(19) United States
(12) Patent Application Publication
(10) Pub. No.: US 2023/0295622 A1
(43) Pub. Date: Sep. 21, 2023

(54) COMPOSITIONS AND METHODS FOR SILENCING MYOC EXPRESSION

(71) Applicant: ALNYLAM PHARMACEUTICALS, INC., CAMBRIDGE, MA (US)

(72) Inventors: MARK KEATING, WESTON, MA (US); JAMES D. MCININCH, BURLINGTON, MA (US)

(73) Assignee: ALNYLAM PHARMACEUTICALS, INC., CAMBRIDGE, MA (US)

(21) Appl. No.: 17/995,568

(22) PCT Filed: Apr. 6, 2021
(86) PCT No.: PCT/US2021/025928

§ 371 Date: Oct. 5, 2022

Related U.S. Application Data
(60) Provisional application No. 63/005,735, filed on Apr. 6, 2020.

(51) Int. Cl. C12N 15/113; A61P 27/06

(52) U.S. Cl. CPC C12N 15/113; A61P 27/06; C12N 2310/31; C12N 2310/3515

(57) ABSTRACT

The disclosure relates to double-stranded ribonucleic acid (dsRNA) compositions targeting MYOC, and methods of using such dsRNA compositions to alter (e.g., inhibit) expression of MYOC.

### RELATED APPLICATIONS

[0001] This application claims priority to U.S. Provisional Application No. 63/005,735, filed on Apr. 6, 2020. The entire contents of the foregoing application are hereby incorporated herein by reference.

### SEQUENCE LISTING

[0002] The instant application contains a Sequence Listing which has been submitted electronically in ASCII format and is hereby incorporated by reference in its entirety. Said ASCII copy, created on Mar. 31, 2021, is named A2038-7237WO_SL.txt and is 1,020,574 bytes in size.

### FIELD OF THE DISCLOSURE

[0003] The disclosure relates to the specific inhibition of the expression of the MYOC.

### BACKGROUND

[0004] Glaucoma (e.g., primary open angle glaucoma (POAG)) is a major cause of irreversible vision loss in today’s aging population. MYOC protein misfolding occludes its secretion from trabecular meshwork cells, leading to elevated eye pressure that in turn compresses and damages the optic nerve reducing its ability to transmit visual information to the brain, which results in vision loss. New treatments for glaucoma are needed.

### SUMMARY

[0005] The present disclosure describes methods and iRNA compositions for modulating the expression of MYOC. In certain embodiments, expression of MYOC is reduced or inhibited using a MYOC-specific iRNA. Such inhibition can be useful in treating disorders related to MYOC expression, such as ocular disorders (e.g., glaucoma, e.g., primary open angle glaucoma (POAG)).

[0006] Accordingly, described herein are compositions and methods that effect the RNA-induced silencing complex (RISC)-mediated cleavage of RNA transcripts of MYOC, such as in a cell or in a subject (e.g., in a mammal, such as a human subject). Also described are compositions and methods for treating a disorder related to expression of MYOC, such as glaucoma (e.g., primary open angle glaucoma (POAG))

[0007] The iRNAs (e.g., dsRNAs) included in the compositions featured herein include an RNA strand (the antisense strand) having a region, e.g., a region that is 30 nucleotides or less, generally 19-24 nucleotides in length, that is substantially complementary to at least part of an mRNA transcript of MYOC (e.g., a human MYOC) (also referred to herein as a “MYOC-specific iRNA”). In some embodiments, the MYOC mRNA transcript is a human MYOC mRNA transcript, e.g., SEQ ID NO: 1 herein.

[0008] In some embodiments, the iRNA (e.g., dsRNA) described herein comprises an antisense strand having a region that is substantially complementary to a region of a human MYOC mRNA. In some embodiments, the human MYOC mRNA has the sequence NM_000261.2 (SEQ ID NO: 1). The sequence of NM_000261.2 is also herein incorporated by reference in its entirety. The reverse complement of SEQ ID NO: 1 is provided as SEQ ID NO: 2 herein.

[0009] In some aspects, the present disclosure provides a double stranded ribonucleic acid (dsRNA) agent for inhibiting expression of myocilin (MYOC), wherein the dsRNA agent comprises a sense strand and an antisense strand forming a double stranded region, wherein the sense strand comprises a nucleotide sequence comprising at least 15 contiguous nucleotides, with 0, 1, 2, or 3 mismatches, of a portion of a coding strand of human MYOC and the antisense strand comprises a nucleotide sequence comprising at least 15 contiguous nucleotides, with 0, 1, 2, or 3 mismatches, of the corresponding portion of a non-coding strand of human MYOC such that the sense strand is complementary to the at least 15 contiguous nucleotides in the antisense strand.

[0010] In some aspects, the present disclosure provides a double stranded ribonucleic acid (dsRNA) agent for inhibiting expression of MYOC, wherein the dsRNA agent comprises a sense strand and an antisense strand forming a double stranded region, wherein the antisense strand comprises a nucleotide sequence comprising at least 15 contiguous nucleotides, with 0, 1, 2, or 3 mismatches, of a portion of nucleotide sequence of SEQ ID NO: 2 such that the sense strand is complementary to the at least 15 contiguous nucleotides in the antisense strand.

[0011] In some aspects, the present disclosure provides a human cell or tissue comprising a reduced level of MYOC mRNA or a level of MYOC protein as compared to an otherwise similar untreated cell or tissue, wherein optionally the cell or tissue is not genetically engineered (e.g., wherein the cell or tissue comprises one or more naturally arising mutations, e.g., MYOC mutations), wherein optionally the level is reduced by at least 10%, 15%, 20%, 25%, 30%, 35%, 40%, 45%, 50%, 55%, 60%, 65%, 70%, 75%, 80%, 85%, 90%, or 95%. In some embodiments, the human cell or tissue is a trabecular meshwork tissue, a ciliary body, a retinal pigment epithelium (RPE), a retinal tissue, an astrocyte, a pericyte, a Müller cell, a ganglion cell, an endothelial cell, a photoreceptor cell, a retinal blood vessel (e.g., including endothelial cells and vascular smooth muscle cells), or choroid tissue, e.g., a choroid vessel.

[0012] The present disclosure also provides, in some aspects, a cell containing the dsRNA agent described herein.

[0013] In another aspect, provided herein is a human ocular cell, e.g., (a cell of the trabecular meshwork, a cell of the ciliary body, an RPE cell, a retinal cell, an astrocyte, a pericyte, a Müller cell, a ganglion cell, an endothelial cell, or a photoreceptor cell) comprising a reduced level of MYOC mRNA or a level of MYOC protein as compared to an otherwise similar untreated cell. In some embodiments, the level is reduced by at least 10%, 15%, 20%, 25%, 30%, 35%, 40%, 45%, 50%, 55%, 60%, 65%, 70%, 75%, 80%, 85%, 90%, or 95%.

[0014] In some aspects, the present disclosure also provides a pharmaceutical composition for inhibiting expression of a gene encoding MYOC, comprising a dsRNA agent described herein.

[0015] The present disclosure also provides, in some aspects, a method of inhibiting expression of MYOC in a cell, the method comprising:
[0016] (a) contacting the cell with the dsRNA agent described herein, or a pharmaceutical composition described herein; and
[0017] (b) maintaining the cell produced in step (a) for a time sufficient to obtain degradation of the mRNA transcript of MYOC, thereby inhibiting expression of the MYOC in the cell.

[0018] The present disclosure also provides, in some aspects, a method of inhibiting expression of MYOC in a cell, the method comprising:
[0019] (a) contacting the cell with the dsRNA agent described herein, or a pharmaceutical composition described herein; and
[0020] (b) maintaining the cell produced in step (a) for a time sufficient to reduce levels of MYOC mRNA, MYOC protein, or both of MYOC mRNA and protein, thereby inhibiting expression of the MYOC in the cell.

[0021] The present disclosure also provides, in some aspects, a method of inhibiting expression of MYOC in an ocular cell or tissue, the method comprising:
[0022] (a) contacting the cell or tissue with a dsRNA agent that binds MYOC; and
[0023] (b) maintaining the cell or tissue produced in step (a) for a time sufficient to reduce levels of MYOC mRNA, MYOC protein, or both of MYOC mRNA and protein, thereby inhibiting expression of MYOC in the cell or tissue.

[0024] The present disclosure also provides, in some aspects, a method of treating a subject diagnosed with MYOC-associated disorder comprising administering to the subject a therapeutically effective amount of the dsRNA agent described herein or a pharmaceutical composition described herein, thereby treating the disorder.

[0025] In any of the aspects herein, e.g., the compositions and methods above, any of the embodiments herein (e.g., below) may apply.

[0026] In some embodiments, the coding strand of human MYOC has the sequence of SEQ ID NO: 1. In some embodiments, the non-coding strand of human MYOC has the sequence of SEQ ID NO: 2.

[0027] In some embodiments, the sense strand comprises a nucleotide sequence comprising at least 15 contiguous nucleotides, with 0, or 1, 2, or 3 mismatches, of the corresponding portion of the nucleotide sequence of SEQ ID NO: 1.

[0028] In some embodiments, the dsRNA agent comprises a sense strand and an antisense strand, wherein the antisense strand comprises a nucleotide sequence comprising at least 17 contiguous nucleotides, with 0, 1, 2, or 3 mismatches, of a portion of nucleotide sequence of SEQ ID NO: 2 such that the sense strand is complementary to the at least 17 contiguous nucleotides in the antisense strand. In some embodiments, the sense strand comprises a nucleotide sequence comprising at least 17 contiguous nucleotides, with 0, or 1, 2, or 3 mismatches, of the corresponding portion of the nucleotide sequence of SEQ ID NO: 1.

[0029] In some embodiments, the dsRNA agent comprises a sense strand and an antisense strand, wherein the antisense strand comprises a nucleotide sequence comprising at least 19 contiguous nucleotides, with 0, 1, 2, or 3 mismatches, of a portion of nucleotide sequence of SEQ ID NO: 2 such that the sense strand is complementary to the at least 19 contiguous nucleotides in the antisense strand. In some embodiments, the sense strand comprises a nucleotide sequence comprising at least 19 contiguous nucleotides, with 0, 1, 2, or 3 mismatches, of the corresponding portion of the nucleotide sequence of SEQ ID NO: 1.

[0030] In some embodiments, the dsRNA agent comprises a sense strand and an antisense strand, wherein the antisense strand comprises a nucleotide sequence comprising at least 21 contiguous nucleotides, with 0, 1, 2, or 3 mismatches, of a portion of nucleotide sequence of SEQ ID NO: 2 such that the sense strand is complementary to the at least 21 contiguous nucleotides in the antisense strand. In some embodiments, the sense strand comprises a nucleotide sequence comprising at least 21 contiguous nucleotides, with 0, or 1, 2, or 3 mismatches, of the corresponding portion of the nucleotide sequence of SEQ ID NO: 1.

[0031] In some embodiments, the portion of the sense strand is a portion within a sense strand in any one of Tables 2A, 2B, 3A, 3B, 4A, 4B, 5A, and 5B.

[0032] In some embodiments, the portion of the antisense strand is a portion within an antisense strand in any one of Tables 2A, 2B, 3A, 3B, 4A, 4B, 5A, and 5B.

[0033] In some embodiments, the antisense strand comprises a nucleotide sequence comprising at least 15 contiguous nucleotides, with 0, 1, 2, or 3 mismatches, from one of the antisense sequences listed in any one of Tables 2A, 2B, 3A, 3B, 4A, 4B, 5A, and 5B. In some embodiments, the sense strand comprises a nucleotide sequence comprising at least 15 contiguous nucleotides, with 0, 1, 2, or 3 mismatches, from a sense sequence listed in any one of Tables 2A, 2B, 3A, 3B, 4A, 4B, 5A, and 5B that corresponds to the antisense sequence.

[0034] In some embodiments, the antisense strand comprises a nucleotide sequence comprising at least 17 contiguous nucleotides, with 0, 1, 2, or 3 mismatches, from one of the antisense sequences listed in any one of Tables 2A, 2B, 3A, 3B, 4A, 4B, 5A, and 5B. In some embodiments, the sense strand comprises a nucleotide sequence comprising at least 17 contiguous nucleotides, with 0, 1, 2, or 3 mismatches, from a sense sequence listed in any one of Tables 2A, 2B, 3A, 3B, 4A, 4B, 5A, and 5B that corresponds to the antisense sequence.

[0035] In some embodiments, the antisense strand comprises a nucleotide sequence comprising at least 19 contiguous nucleotides, with 0, 1, 2, or 3 mismatches, from one of the antisense sequences listed in any one of Tables 2A, 2B, 3A, 3B, 4A, 4B, 5A, and 5B. In some embodiments, the sense strand comprises a nucleotide sequence comprising at least 19 contiguous nucleotides, with 0, 1, 2, or 3 mismatches, from a sense sequence listed in any one of Tables 2A, 2B, 3A, 3B, 4A, 4B, 5A, and 5B that corresponds to the antisense sequence.

[0036] In some embodiments, the antisense strand comprises a nucleotide sequence comprising at least 21 contiguous nucleotides, with 0, 1, 2, or 3 mismatches, from one of the antisense sequences listed in any one of Tables 2A, 2B, 3A, 3B, 4A, 4B, 5A, and 5B. In some embodiments, the sense strand comprises a nucleotide sequence comprising at least 21 contiguous nucleotides, with 0, 1, 2, or 3 mismatches, from a sense sequence listed in any one of Tables 2A, 2B, 3A, 3B, 4A, 4B, 5A, and 5B that corresponds to the antisense sequence.

[0037] In some embodiments, the sense strand of the dsRNA agent is at least 23 nucleotides in length, e.g., 23-30 nucleotides in length.

[0038] In some embodiments, at least one of the sense strand and the antisense strand is conjugated to one or more lipophilic moieties. In some embodiments, the lipophilic moiety is conjugated to one or more positions in the double stranded region of the dsRNA agent. In some embodiments, the lipophilic moiety is conjugated via a linker or carrier. In some embodiments, lipophilicity of the lipophilic moiety, measured by logK_{ow}, exceeds 0.

[0039] In some embodiments, the hydrophobicity of the double-stranded RNAi agent, measured by the unbound fraction in a plasma protein binding assay of the double-stranded RNAi agent, exceeds 0.2. In some embodiments, the plasma protein binding assay is an electrophoretic mobility shift assay using human serum albumin protein.

[0040] In some embodiments, the dsRNA agent comprises at least one modified nucleotide. In some embodiments, no more than five of the sense strand nucleotides and not more than five of the nucleotides of the antisense strand are unmodified nucleotides. In some embodiments, all of the nucleotides of the sense strand and all of the nucleotides of the antisense strand comprise a modification.

[0041] In some embodiments, at least one of the modified nucleotides is selected from the group consisting of a deoxy-nucleotide, a 3′-terminal deoxy-thymine (dT) nucleotide, a 2′-O-methyl modified nucleotide, a 2′-fluoro modified nucleotide, a 2′-deoxy-modified nucleotide, a locked nucleotide, an unlocked nucleotide, a conformationally restricted nucleotide, a constrained ethyl nucleotide, an abasic nucleotide, a 2′-amino-modified nucleotide, a 2′-O-allyl-modified nucleotide, 2′-C-alkyl-modified nucleotide, a 2′-methoxyethyl modified nucleotide, a 2′-0-alkyl-modified nucleotide, a morpholino nucleotide, a phosphoramidate, a non-natural base comprising nucleotide, a tetrahydropyran modified nucleotide, a 1,5-anhydrohexitol modified nucleotide, a cyclohexenyl modified nucleotide, a nucleotide comprising a phosphorothioate group, a nucleotide comprising a methylphosphonate group, a nucleotide comprising a 5′-phosphate, a nucleotide comprising a 5′-phosphate mimic, a glycol modified nucleotide, and a 2′-O-(N-methylacetamide) modified nucleotide; and combinations thereof. In some embodiments, no more than five of the sense strand nucleotides and not more than five of the nucleotides of the antisense strand include modifications other than 2′-O-methyl modified nucleotide, a 2′-fluoro modified nucleotide, a 2′-deoxy-modified nucleotide, unlocked nucleic acids (UNA) or glycerol nucleic acid (GNA).

[0042] In some embodiments, the dsRNA comprises a non-nucleotide spacer (wherein optionally the non-nucleotide spacer comprises a C3-C6 alkyl) between two of the contiguous nucleotides of the sense strand or between two of the contiguous nucleotides of the antisense strand.

[0043] In some embodiments, each strand is no more than 30 nucleotides in length. In some embodiments, at least one strand comprises a 3′ overhang of at least 1 nucleotide. In some embodiments, at least one strand comprises a 3′ overhang of at least 2 nucleotides. In some embodiments, at least one strand comprises a 3′ overhang of 2 nucleotides.

[0044] In some embodiments, the double stranded region is 15-30 nucleotide pairs in length. In some embodiments, the double stranded region is 17-23 nucleotide pairs in length. In some embodiments, the double stranded region is 17-25 nucleotide pairs in length. In some embodiments, the double stranded region is 23-27 nucleotide pairs in length. In some embodiments, the double stranded region is 19-21 nucleotide pairs in length. In some embodiments, the double stranded region is 21-23 nucleotide pairs in length. In some embodiments, each strand has 19-30 nucleotides. In some embodiments, each strand has 19-23 nucleotides. In some embodiments, each strand has 21-23 nucleotides.

[0045] In some embodiments, the agent comprises at least one phosphorothioate or methylphosphonate internucleotide linkage. In some embodiments, the phosphorothioate or methylphosphonate internucleotide linkage is at the 3′-terminus of one strand. In some embodiments, the strand is the antisense strand. In some embodiments, the strand is the sense strand.

[0046] In some embodiments, the phosphorothioate or methylphosphonate internucleotide linkage is at the 5′-terminus of one strand. In some embodiments, the strand is the antisense strand. In some embodiments, the strand is the sense strand.

[0047] In some embodiments, each of the 5′- and 3′-terminus of one strand comprises a phosphorothioate or methylphosphonate internucleotide linkage. In some embodiments, the strand is the antisense strand.

[0048] In some embodiments, the base pair at the 1 position of the 5′-end of the antisense strand of the duplex is an AU base pair.

[0049] In some embodiments, the sense strand has a total of 21 nucleotides and the antisense strand has a total of 23 nucleotides.

[0050] In some embodiments, one or more lipophilic moieties are conjugated to one or more internal positions on at least one strand. In some embodiments, the one or more lipophilic moieties are conjugated to one or more internal positions on at least one strand via a linker or carrier.

[0051] In some embodiments, the internal positions include all positions except the terminal two positions from each end of the at least one strand. In some embodiments, the internal positions include all positions except the terminal three positions from each end of the at least one strand. In some embodiments, the internal positions exclude a cleavage site region of the sense strand. In some embodiments, the internal positions include all positions except positions 9-12, counting from the 5′-end of the sense strand. In some embodiments, the internal positions include all positions except positions 11-13, counting from the 3′-end of the sense strand. In some embodiments, the internal positions exclude a cleavage site region of the antisense strand. In some embodiments, the internal positions include all positions except positions 12-14, counting from the 5′-end of the antisense strand. In some embodiments, the internal positions include all positions except positions 11-13 on the sense strand, counting from the 3′-end, and positions 12-14 on the antisense strand, counting from the 5′-end.

[0052] In some embodiments, the one or more lipophilic moieties are conjugated to one or more of the internal positions selected from the group consisting of positions 4-8 and 13-18 on the sense strand, and positions 6-10 and 15-18 on the antisense strand, counting from the 5′end of each strand. In some embodiments, the one or more lipophilic moieties are conjugated to one or more of the internal positions selected from the group consisting of positions 5, 6, 7, 15, and 17 on the sense strand, and positions 15 and 17 on the antisense strand, counting from the 5′-end of each strand.

[0053] In some embodiments, the positions in the double stranded region exclude a cleavage site region of the sense strand.

[0054] In some embodiments, the sense strand is 21 nucleotides in length, the antisense strand is 23 nucleotides in length, and the lipophilic moiety is conjugated to position 21, position 20, position 15, position 1, position 7, position 6, or position 2 of the sense strand or position 16 of the antisense strand. In some embodiments, the lipophilic moiety is conjugated to position 21, position 20, position 15, position 1, or position 7 of the sense strand. In some embodiments, the lipophilic moiety is conjugated to position 21, position 20, or position 15 of the sense strand. In some embodiments, the lipophilic moiety is conjugated to position 20 or position 15 of the sense strand. In some embodiments, the lipophilic moiety is conjugated to position 16 of the antisense strand. In some embodiments, the lipophilic moiety is conjugated to position 6, counting from the 5′-end of the sense strand.

[0055] In some embodiments, the lipophilic moiety is an aliphatic, alicyclic, or polyalicyclic compound. In some embodiments, the lipophilic moiety is selected from the group consisting of lipid, cholesterol, retinoic acid, cholic acid, adamantane acetic acid, 1-pyrene butyric acid, dihydrotestosterone, 1,3-bis-O(hexadecyl)glycerol, geranyloxyhexyanol, hexadecylglycerol, borneol, menthol, 1,3-propanediol, heptadecyl group, palmitic acid, myristic acid, O3-(oleoyl)lithocholic acid, O3-(oleoyl)cholenic acid, dimethoxytrityl, or phenoxazine. In some embodiments, the lipophilic moiety contains a saturated or unsaturated C4-C30 hydrocarbon chain, and an optional functional group selected from the group consisting of hydroxyl, amine, carboxylic acid, sulfonate, phosphate, thiol, azide, and alkyne. In some embodiments, the lipophilic moiety contains a saturated or unsaturated C6-C18 hydrocarbon chain. In some embodiments, the lipophilic moiety contains a saturated or unsaturated C16 hydrocarbon chain.

[0056] In some embodiments, the lipophilic moiety is conjugated via a carrier that replaces one or more nucleotide(s) in the internal position(s) or the double stranded region. In some embodiments, the carrier is a cyclic group selected from the group consisting of pyrrolidinyl, pyrazolinyl, pyrazolidinyl, imidazolinyl, imidazolidinyl, piperidinyl, piperazinyl, [1,3]dioxolanyl, oxazolidinyl, isoxazolidinyl, morpholinyl, thiazolidinyl, isothiazolidinyl, quinoxalinyl, pyridazinonyl, tetrahydrofuranyl, and decalinyl; or is an acyclic moiety based on a serinol backbone or a diethanolamine backbone.

[0057] In some embodiments, the lipophilic moiety is conjugated to the double-stranded iRNA agent via a linker containing an ether, thioether, urea, carbonate, amine, amide, maleimide-thioether, disulfide, phosphodiester, sulfonamide linkage, a product of a click reaction, or carbamate.

[0058] In some embodiments, the lipophilic moiety is conjugated to a nucleobase, sugar moiety, or internucleosidic linkage.

[0059] In some embodiments, the lipophilic moiety or targeting ligand is conjugated via a bio-cleavable linker selected from the group consisting of DNA, RNA, disulfide, amide, functionalized monosaccharides or oligosaccharides of galactosamine, glucosamine, glucose, galactose, mannose, and combinations thereof.

[0060] In some embodiments, the 3′ end of the sense strand is protected via an end cap which is a cyclic group having an amine, said cyclic group being selected from the group consisting of pyrrolidinyl, pyrazolinyl, pyrazolidinyl, imidazolinyl, imidazolidinyl, piperidinyl, piperazinyl, [1,3]dioxolanyl, oxazolidinyl, isoxazolidinyl, morpholinyl, thiazolidinyl, isothiazolidinyl, quinoxalinyl, pyridazinonyl, tetrahydrofuranyl, and decalinyl.

[0061] In some embodiments, the dsRNA agent further comprises a targeting ligand, e.g., a ligand that targets an ocular tissue or a liver tissue. In some embodiments, the ocular tissue is a trabecular meshwork tissue, a ciliary body, a retinal tissue, a retinal pigment epithelium (RPE) or choroid tissue, e.g., a choroid vessel.

[0062] In some embodiments, the ligand is conjugated to the sense strand. In some embodiments, the ligand is conjugated to the 3′ end or the 5′ end of the sense strand. In some embodiments, the ligand is conjugated to the 3′ end of the sense strand.

[0063] In some embodiments, the ligand comprises N-acetylgalactosamine (GalNAc). In some embodiments, the targeting ligand comprises one or more GalNAc conjugates or one or more GalNAc derivatives. In some embodiments, the ligand is one or more GalNAc conjugates or one or more GalNAc derivatives are attached through a monovalent linker, or a bivalent, trivalent, or tetravalent branched linker. In some embodiments, the ligand is

[chemical structure]

[0064] In some embodiments, the dsRNA agent is conjugated to the ligand as shown in the following schematic

[chemical structure]

wherein X is O or S. In some embodiments, the X is O.

[0065] In some embodiments, the dsRNA agent further comprises a terminal, chiral modification occurring at the first internucleotide linkage at the 3′ end of the antisense strand, having the linkage phosphorus atom in Sp configuration, a terminal, chiral modification occurring at the first internucleotide linkage at the 5′ end of the antisense strand, having the linkage phosphorus atom in Rp configuration, and a terminal, chiral modification occurring at the first internucleotide linkage at the 5′ end of the sense strand, having the linkage phosphorus atom in either Rp configuration or Sp configuration.

[0066] In some embodiments, the dsRNA agent further comprises a terminal, chiral modification occurring at the first and second internucleotide linkages at the 3′ end of the antisense strand, having the linkage phosphorus atom in Sp configuration, a terminal, chiral modification occurring at the first internucleotide linkage at the 5′ end of the antisense strand, having the linkage phosphorus atom in Rp configuration, and a terminal, chiral modification occurring at the first internucleotide linkage at the 5′ end of the sense strand, having the linkage phosphorus atom in either Rp or Sp configuration.

[0067] In some embodiments, the dsRNA agent further comprises a terminal, chiral modification occurring at the first, second and third internucleotide linkages at the 3′ end of the antisense strand, having the linkage phosphorus atom in Sp configuration, a terminal, chiral modification occurring at the first internucleotide linkage at the 5′ end of the antisense strand, having the linkage phosphorus atom in Rp configuration, and a terminal, chiral modification occurring at the first internucleotide linkage at the 5′ end of the sense strand, having the linkage phosphorus atom in either Rp or Sp configuration.

[0068] In some embodiments, the dsRNA agent further comprises a terminal, chiral modification occurring at the first, and second internucleotide linkages at the 3′ end of the antisense strand, having the linkage phosphorus atom in Sp configuration, a terminal, chiral modification occurring at the third internucleotide linkages at the 3′ end of the antisense strand, having the linkage phosphorus atom in Rp configuration, a terminal, chiral modification occurring at the first internucleotide linkage at the 5′ end of the antisense strand, having the linkage phosphorus atom in Rp configuration, and a terminal, chiral modification occurring at the first internucleotide linkage at the 5′ end of the sense strand, having the linkage phosphorus atom in either Rp or Sp configuration.

[0069] In some embodiments, the dsRNA agent further comprises a terminal, chiral modification occurring at the first, and second internucleotide linkages at the 3′ end of the antisense strand, having the linkage phosphorus atom in Sp configuration, a terminal, chiral modification occurring at the first, and second internucleotide linkages at the 5′ end of the antisense strand, having the linkage phosphorus atom in Rp configuration, and a terminal, chiral modification occurring at the first internucleotide linkage at the 5′ end of the sense strand, having the linkage phosphorus atom in either Rp or Sp configuration.

[0070] In some embodiments, the dsRNA agent further comprises a phosphate or phosphate mimic at the 5′-end of the antisense strand. In some embodiments, the phosphate mimic is a 5′-vinyl phosphonate (VP).

[0071] In some embodiments, a cell described herein, e.g., a human cell, was produced by a process comprising contacting a human cell with the dsRNA agent described herein.

[0072] In some embodiments, a pharmaceutical composition described herein comprises the dsRNA agent and a lipid formulation.

[0073] In some embodiments (e.g., embodiments of the methods described herein), the cell is within a subject. In some embodiments, the subject is a human. In some embodiments, the level of MYOC mRNA is inhibited by at least 50%. In some embodiments, the level of MYOC protein is inhibited by at least 50%. In some embodiments, the expression of MYOC is inhibited by at least 50%. In some embodiments, inhibiting expression of MYOC decreases the MYOC protein level in a biological sample (e.g., an aqueous ocular fluid sample) from the subject by at least 30%, 40%, 50%, 60%, 70%, 80%, 90%, or 95%. In some embodiments, inhibiting expression of MYOC gene decreases the MYOC mRNA level in a biological sample (e.g., an aqueous ocular fluid sample) from the subject by at least 30%, 40%, 50%, 60%, 70%, 80%, 90%, or 95%.

[0074] In some embodiments, the subject has been diagnosed with a MYOC-associated disorder. In some embodiments, the subject meets at least one diagnostic criterion for a MYOC-associated disorder. In some embodiments, the MYOC associated disorder is glaucoma. In some embodiments, the MYOC associated disorder is primary open angle glaucoma (POAG).

[0075] In some embodiments, the ocular cell or tissue is a trabecular meshwork tissue, a ciliary body, RPE, a retinal cell, an astrocyte, a pericyte, a Müller cell, a ganglion cell, an endothelial cell, a photoreceptor cell, a retinal blood vessel (e.g., including endothelial cells and vascular smooth muscle cells), or choroid tissue, e.g., a choroid vessel.

[0076] In some embodiments, the MYOC-associated disorder is a glaucoma. In some embodiments, the glaucoma is caused by or associated with an elevated eye pressure. In some embodiments, the glaucoma primary open angle glaucoma (POAG)).

[0077] In some embodiments, treating comprises amelioration of at least one sign or symptom of the disorder. In some embodiments, the at least one sign or symptom includes a measure of one or more of optic nerve damage, vision loss, tunnel vision, blurred vision, eye pain or presence, level, or activity of MYOC (e.g., MYOC gene, MYOC mRNA, or MYOC protein).

[0078] In some embodiments, a level of the MYOC that is higher than a reference level is indicative that the subject has glaucoma. In some embodiments, treating comprises prevention of progression of the disorder. In some embodiments, the treating comprises one or more of (a) inhibiting or reducing the expression or activity of MYOC; (b) reducing the level of misfolded MYOC protein; (c) reducing trabecular meshwork cell death; (d) decreasing intraocular pressure; or (e) increasing visual acuity.

[0079] In some embodiments, the treating results in at least a 30% mean reduction from baseline of MYOC mRNA in the trabecular meshwork tissue, ciliary body, retina, RPE, a retinal blood vessel (e.g., including endothelial cells and vascular smooth muscle cells), or choroid tissue, e.g., a choroid vessel. In some embodiments, the treating results in at least a 60% mean reduction from baseline of MYOC mRNA in the trabecular meshwork tissue, ciliary body, retina, RPE, a retinal blood vessel (e.g., including endothelial cells and vascular smooth muscle cells), or choroid tissue, e.g., a choroid vessel. In some embodiments, the treating results in at least a 90% mean reduction from baseline of MYOC mRNA in the trabecular meshwork tissue, ciliary body, retina, RPE, a retinal blood vessel (e.g., including endothelial cells and vascular smooth muscle cells), or choroid tissue, e.g., a choroid vessel.

[0080] In some embodiments, after treatment the subject experiences at least an 8-week duration of knockdown following a single dose of dsRNA as assessed by MYOC protein in the retina. In some embodiments, treating results in at least a 12-week duration of knockdown following a single dose of dsRNA as assessed by MYOC protein in the retina. In some embodiments, treating results in at least a 16-week duration of knockdown following a single dose of dsRNA as assessed by MYOC protein in the retina.

[0081] In some embodiments, the subject is human.

[0082] In some embodiments, the dsRNA agent is administered at a dose of about 0.01 mg/kg to about 50 mg/kg.

[0083] In some embodiments, the dsRNA agent is administered to the subject intraocularly. In some embodiments, the intraocular administration comprises intravitreal administration, e.g., intravitreal injection; transscleral administration, e.g., transscleral injection; subconjunctival administration, e.g., subconjunctival injection; retrobulbar administration, e.g., retrobulbar injection; intracameral administration, e.g., intracameral injection, or subretinal administration, e.g., subretinal injection.

[0084] In some embodiments, the dsRNA agent is administered to the subject intravenously. In some embodiments, the dsRNA agent is administered to the subject topically.

[0085] In some embodiments, a method described herein further comprises measuring a level of MYOC (e.g., MYOC gene, MYOC mRNA, or MYOC protein) in the subject. In some embodiments, measuring the level of MYOC in the subject comprises measuring the level of MYOC protein in a biological sample from the subject (e.g., an aqueous ocular fluid sample). In some embodiments, a method described herein further comprises performing a blood test, an imaging test, or an aqueous ocular fluid biopsy (e.g., an aqueous humor tap).

[0086] In some embodiments, a method described herein further measuring a level of MYOC (e.g., MYOC gene, MYOC mRNA, or MYOC protein) in the subject is performed prior to treatment with the dsRNA agent or the pharmaceutical composition. In some embodiments, upon determination that a subject has a level of MYOC that is greater than a reference level, the dsRNA agent or the pharmaceutical composition is administered to the subject. In some embodiments, measuring level of MYOC in the subject is performed after treatment with the dsRNA agent or the pharmaceutical composition.

[0087] In some embodiments, a method described herein further comprises treating the subject with a therapy suitable for treatment or prevention of a MYOC-associated disorder, e.g., wherein the therapy comprises laser trabeculoplasty surgery, trabeculectomy surgery, a minimally invasive glaucoma surgery, or placement of a drainage tube in the eye.. In some embodiments, a method described herein further comprises administering to the subject an additional agent suitable for treatment or prevention of a MYOC-associated disorder. In some embodiments, the additional agent comprises a carbonic anhydrase inhibitor, a prostaglandin, a beta blocker, an alpha-adrenergic agonist, a carbonic anhydrase inhibitor, a Rho kinase inhibitor, or a cholinergic agent, or any combination thereof.. In some embodiments, the additional agent comprises an oral medication or an eye drop.

[0088] All publications, patent applications, patents, and other references mentioned herein are incorporated by reference in their entirety.

[0089] The details of various embodiments of the disclosure are set forth in the description below. Other features, objects, and advantages of the disclosure will be apparent from the description and the drawings, and from the claims.

### DETAILED DESCRIPTION

[0090] iRNA directs the sequence-specific degradation of mRNA through a process known as RNA interference (RNAi). Described herein are iRNAs and methods of using them for modulating (e.g., inhibiting) the expression of MYOC. Also provided are compositions and methods for treatment of disorders related to MYOC expression, such as glaucoma (e.g., primary open angle glaucoma (POAG)).

[0091] Human MYOC is a secreted glycoprotein of approximately 57 kDa that regulates the activation of several signaling pathways in adjacent cells to control different processes including cell adhesion, cell-matrix adhesion, cytoskeleton organization, and cell migration. MYOC is typically expressed and secreted by a variety of tissues including the retina and the structures involved in aqueous humor regulation such as the trabecular meshwork tissue and the ciliary body. Aberrant MYOC is associated with glaucoma, for instance primary open angle glaucoma (POAG). Without wishing to be bound by theory, aberrant MYOC may exacerbate the pathogenesis of glaucoma, e.g., by impeding the drainage of aqueous humor consequently leading to an increased intraocular pressure.

[0092] The following description discloses how to make and use compositions containing iRNAs to modulate (e.g., inhibit) the expression of MYOC, as well as compositions and methods for treating disorders related to expression of MYOC.

[0093] In some aspects, pharmaceutical compositions containing MYOC iRNA and a pharmaceutically acceptable carrier, methods of using the compositions to inhibit expression of MYOC, and methods of using the pharmaceutical compositions to treat disorders related to expression of MYOC (e.g., glaucoma, e.g., primary open angle glaucoma (POAG)) are featured herein.

### I. Definitions

[0094] For convenience, the meaning of certain terms and phrases used in the specification, examples, and appended claims, are provided below. If there is an apparent discrepancy between the usage of a term in other parts of this specification and its definition provided in this section, the definition in this section shall prevail.

[0095] The term “about” when referring to a number or a numerical range means that the number or numerical range referred to is an approximation within experimental variability (or within statistical experimental error), and thus the number or numerical range may vary from, for example, between 1% and 15% of the stated number or numerical range.

[0096] The term “at least” prior to a number or series of numbers is understood to include the number adjacent to the term “at least”, and all subsequent numbers or integers that could logically be included, as clear from context. For example, the number of nucleotides in a nucleic acid molecule must be an integer. For example, “at least 17 nucleotides of a 20-nucleotide nucleic acid molecule” means that 17, 18, 19, or 20 nucleotides have the indicated property. When at least is present before a series of numbers or a range, it is understood that “at least” can modify each of the numbers in the series or range.

[0097] As used herein, “no more than” or “less than” is understood as the value adjacent to the phrase and logical lower values or integers, as logical from context, to zero. For example, a duplex with mismatches to a target site of “no more than 2 nucleotides” has a 2, 1, or 0 mismatches. When “no more than” is present before a series of numbers or a range, it is understood that “no more than” can modify each of the numbers in the series or range.

[0098] As used herein, “up to” as in “up to 10” is understood as up to and including 10, i.e., 0, 1, 2, 3, 4, 5, 6, 7, 8, 9, or 10.

[0099] Ranges provided herein are understood to include all individual integer values and all subranges within the ranges.

[0100] The terms “activate,” “enhance,” “up-regulate the expression of,” “increase the expression of,” and the like, in so far as they refer to a MYOC gene, herein refer to the at least partial activation of the expression of a MYOC gene, as manifested by an increase in the amount of MYOC mRNA, which may be isolated from or detected in a first cell or group of cells in which a MYOC gene is transcribed and which has or have been treated such that the expression of a MYOC gene is increased, as compared to a second cell or group of cells substantially identical to the first cell or group of cells but which has or have not been so treated (control cells).

[0101] In some embodiments, expression of a MYOC gene is activated by at least about 10%, 15%, 20%, 25%, 30%, 35%, 40%, 45%, or 50% by administration of an iRNA as described herein. In some embodiments, a MYOC gene is activated by at least about 60%, 70%, or 80% by administration of an iRNA featured in the disclosure. In some embodiments, expression of a MYOC gene is activated by at least about 85%, 90%, or 95% or more by administration of an iRNA as described herein. In some embodiments, the MYOC gene expression is increased by at least 1-fold, at least 2-fold, at least 5-fold, at least 10-fold, at least 50-fold, at least 100-fold, at least 500-fold, at least 1000-fold or more in cells treated with an iRNA as described herein compared to the expression in an untreated cell. Activation of expression by small dsRNAs is described, for example, in Li et al., 2006 Proc. Natl. Acad. Sci. U.S.A. 103:17337-42, and in US2007/0111963 and US2005/226848, each of which is incorporated herein by reference.

[0102] The terms “silence,” “inhibit expression of,” “down-regulate expression of,” “suppress expression of,” and the like, in so far as they refer to MYOC, herein refer to the at least partial suppression of the expression of MYOC, as assessed, e.g., based on MYOC mRNA expression, MYOC protein expression, or another parameter functionally linked to MYOC expression. For example, inhibition of MYOC expression may be manifested by a reduction of the amount of MYOC mRNA which may be isolated from or detected in a first cell or group of cells in which MYOC is transcribed and which has or have been treated such that the expression of MYOC is inhibited, as compared to a control. The control may be a second cell or group of cells substantially identical to the first cell or group of cells, except that the second cell or group of cells have not been so treated (control cells). The degree of inhibition is usually expressed as a percentage of a control level, e.g.,

$$\frac{\left(\text{mRNA in control cells}\right) - \left(\text{mRNA in treated cells}\right)}{\left(\text{mRNA in control cells}\right)} \cdot 100 \%$$

[0103] Alternatively, the degree of inhibition may be given in terms of a reduction of a parameter that is functionally linked to MYOC expression, e.g., the amount of protein encoded by a MYOC gene. The reduction of a parameter functionally linked to MYOC expression may similarly be expressed as a percentage of a control level. In principle, MYOC silencing may be determined in any cell expressing MYOC, either constitutively or by genomic engineering, and by any appropriate assay.

[0104] For example, in certain instances, expression of MYOC is suppressed by at least about 10%, 15%, 20%, 25%, 30%, 35%, 40%, 45%, or 50% by administration of an iRNA disclosed herein. In some embodiments, MYOC is suppressed by at least about 60%, 65%, 70%, 75%, or 80% by administration of an iRNA disclosed herein. In some embodiments, MYOC is suppressed by at least about 85%, 90%, 95%, 98%, 99%, or more by administration of an iRNA as described herein.

[0105] The term “antisense strand” or “guide strand” refers to the strand of an iRNA, e.g., a dsRNA, which includes a region that is substantially complementary to a target sequence.

[0106] As used herein, the term “region of complementarity” refers to the region on the antisense strand that is substantially complementary to a sequence, for example a target sequence, as defined herein. Where the region of complementarity is not fully complementary to the target sequence, the mismatches may be in the internal or terminal regions of the molecule. In some embodiments, the region of complementarity comprises 0, 1, or 2 mismatches.

[0107] The term “sense strand” or “passenger strand” as used herein, refers to the strand of an iRNA that includes a region that is substantially complementary to a region of the antisense strand as that term is defined herein.

[0108] The terms “blunt” or “blunt ended” as used herein in reference to a dsRNA mean that there are no unpaired nucleotides or nucleotide analogs at a given terminal end of a dsRNA, i.e., no nucleotide overhang. One or both ends of a dsRNA can be blunt. Where both ends of a dsRNA are blunt, the dsRNA is said to be blunt ended. To be clear, a “blunt ended” dsRNA is a dsRNA that is blunt at both ends, i.e., no nucleotide overhang at either end of the molecule. Most often such a molecule will be double-stranded over its entire length.

[0109] As used herein, and unless otherwise indicated, the term “complementary,” when used to describe a first nucleotide sequence in relation to a second nucleotide sequence, refers to the ability of an oligonucleotide or polynucleotide comprising the first nucleotide sequence to hybridize and form a duplex structure under certain conditions with an oligonucleotide or polynucleotide comprising the second nucleotide sequence, as will be understood by the skilled person. Such conditions can, for example, be stringent conditions, where stringent conditions may include: 400 mM NaCl, 40 mM PIPES pH 6.4, 1 mM EDTA, 50° C. or 70° C. for 12-16 hours followed by washing. Other conditions, such as physiologically relevant conditions as may be encountered inside an organism, can apply. The skilled person will be able to determine the set of conditions most appropriate for a test of complementarity of two sequences in accordance with the ultimate application of the hybridized nucleotides.

[0110] Complementary sequences within an iRNA, e.g., within a dsRNA as described herein, include base-pairing of the oligonucleotide or polynucleotide comprising a first nucleotide sequence to an oligonucleotide or polynucleotide comprising a second nucleotide sequence over the entire length of one or both nucleotide sequences. Such sequences can be referred to as “fully complementary” with respect to each other herein. However, where a first sequence is referred to as “substantially complementary” with respect to a second sequence herein, the two sequences can be fully complementary, or they may form one or more, but generally not more than 5, 4, 3 or 2 mismatched base pairs upon hybridization for a duplex up to 30 base pairs, while retaining the ability to hybridize under the conditions most relevant to their ultimate application, e.g., inhibition of gene expression via a RISC pathway. However, where two oligonucleotides are designed to form, upon hybridization, one or more single stranded overhangs, such overhangs shall not be regarded as mismatches with regard to the determination of complementarity. For example, a dsRNA comprising one oligonucleotide 21 nucleotides in length and another oligonucleotide 23 nucleotides in length, wherein the longer oligonucleotide comprises a sequence of 21 nucleotides that is fully complementary to the shorter oligonucleotide, may yet be referred to as “fully complementary” for the purposes described herein.

[0111] Complementary sequences, as used herein, may also include, or be formed entirely from, non-Watson-Crick base pairs and/or base pairs formed from non-natural and modified nucleotides, in as far as the above requirements with respect to their ability to hybridize are fulfilled. Such non-Watson-Crick base pairs includes, but are not limited to, G:U Wobble or Hoogstein base pairing.

[0112] The terms “complementary,” “fully complementary” and “substantially complementary” herein may be used with respect to the base matching between the sense strand and the antisense strand of a dsRNA, or between the antisense strand of an iRNA agent and a target sequence, as will be understood from the context of their use.

[0113] As used herein, a polynucleotide that is “substantially complementary to at least part of” a messenger RNA (mRNA) refers to a polynucleotide that is substantially complementary to a contiguous portion of the mRNA of interest (e.g., an mRNA encoding a MYOC protein). For example, a polynucleotide is complementary to at least a part of a MYOC mRNA if the sequence is substantially complementary to a non-interrupted portion of an mRNA encoding MYOC. The term “complementarity” refers to the capacity for pairing between nucleobases of a first nucleic acid and a second nucleic acid.

[0114] As used herein, the term “region of complementarity” refers to the region of one nucleotide sequence agent that is substantially complementary to another sequence, e.g., the region of a sense sequence and corresponding antisense sequence of a dsRNA, or the antisense strand of an iRNA and a target sequence, e.g., a MYOC nucleotide sequence, as defined herein. Where the region of complementarity is not fully complementary to the target sequence, the mismatches can be in the internal or terminal regions of the antisense strand of the iRNA. Generally, the most tolerated mismatches are in the terminal regions, e.g., within 5, 4, 3, or 2 nucleotides of the 5′- or 3′-terminus of the iRNA agent.

[0115] “Contacting,” as used herein, includes directly contacting a cell, as well as indirectly contacting a cell. For example, a cell within a subject may be contacted when a composition comprising an iRNA is administered (e.g., intraocularly, topically, or intravenously) to the subject.

[0116] “Introducing into a cell,” when referring to an iRNA, means facilitating or effecting uptake or absorption into the cell. Absorption or uptake of an iRNA can occur through unaided diffusive or active cellular processes, or by auxiliary agents or devices. The meaning of this term is not limited to cells in vitro; an iRNA may also be “introduced into a cell,” wherein the cell is part of a living organism. In such an instance, introduction into the cell will include the delivery to the organism. For example, for in vivo delivery, iRNA can be injected into a tissue site or administered systemically. In vivo delivery can also be by a β-glucan delivery system, such as those described in U.S. Pat. Nos. 5,032,401 and 5,607,677, and U.S. Publication No. 2005/0281781, which are hereby incorporated by reference in their entirety. In vitro introduction into a cell includes methods known in the art such as electroporation and lipofection. Further approaches are described herein below or known in the art. As used herein, a “disorder related to MYOC expression,” a “disease related to MYOC expression,” a “pathological process related to MYOC expression,” “a MYOC-associated disorder,” “a MYOC-associated disease,” or the like includes any condition, disorder, or disease in which MYOC expression is altered (e.g., decreased or increased relative to a reference level, e.g., a level characteristic of a non-diseased subject). In some embodiments, MYOC expression is decreased. In some embodiments, MYOC expression is increased. In some embodiments, the decrease or increase in MYOC expression is detectable in a tissue sample from the subject (e.g., in an aqueous ocular fluid sample). The decrease or increase may be assessed relative the level observed in the same individual prior to the development of the disorder or relative to other individual(s) who do not have the disorder. The decrease or increase may be limited to a particular organ, tissue, or region of the body (e.g., the eye). MYOC-associated disorders include, but are not limited to, glaucoma (e.g., primary open angle glaucoma (POAG)).

[0117] The term “glaucoma”, as used herein, means any disease of the eye that is caused by or associated with damage to the optic nerve. In some embodiments, the glaucoma is associated with elevated intraocular pressure. In some embodiments, the glaucoma is asymptomatic. In other embodiments, the glaucoma has one or more symptoms, e.g., loss of peripheral vision, tunnel vision, or blind spots. A non-limiting example of glaucoma that is treatable using methods provided herein is primary open angle glaucoma (POAG).

[0118] The term “double-stranded RNA,” “dsRNA,” or “siRNA” as used herein, refers to an iRNA that includes an RNA molecule or complex of molecules having a hybridized duplex region that comprises two anti-parallel and substantially complementary nucleic acid strands, which will be referred to as having “sense” and “antisense” orientations with respect to a target RNA. The duplex region can be of any length that permits specific degradation of a desired target RNA, e.g., through a RISC pathway, but will typically range from 9 to 36 base pairs in length, e.g., 15-30 base pairs in length. Considering a duplex between 9 and 36 base pairs, the duplex can be any length in this range, for example, 9, 10, 11, 12, 13, 14, 15, 16, 17, 18, 19, 20, 21, 22, 23, 24, 25, 26, 27, 28, 29, 30, 31, 32, 33, 34, 35, or 36 and any sub-range therein between, including, but not limited to 15-30 base pairs, 15-26 base pairs, 15-23 base pairs, 15-22 base pairs, 15-21 base pairs, 15-20 base pairs, 15-19 base pairs, 15-18 base pairs, 15-17 base pairs, 18-30 base pairs, 18-26 base pairs, 18-23 base pairs, 18-22 base pairs, 18-21 base pairs, 18-20 base pairs, 19-30 base pairs, 19-26 base pairs, 19-23 base pairs, 19-22 base pairs, 19-21 base pairs, 19-20 base pairs, 20-30 base pairs, 20-26 base pairs, 20-25 base pairs, 20-24 base pairs, 20-23 base pairs, 20-22 base pairs, 20-21 base pairs, 21-30 base pairs, 21-26 base pairs, 21-25 base pairs, 21-24 base pairs, 21-23 base pairs, or 21-22 base pairs. dsRNAs generated in the cell by processing with Dicer and similar enzymes are generally in the range of 19-22 base pairs in length. One strand of the duplex region of a dsDNA comprises a sequence that is substantially complementary to a region of a target RNA. The two strands forming the duplex structure can be from a single RNA molecule having at least one self-complementary region, or can be formed from two or more separate RNA molecules. Where the duplex region is formed from two strands of a single molecule, the molecule can have a duplex region separated by a single stranded chain of nucleotides (herein referred to as a “hairpin loop”) between the 3′-end of one strand and the 5′-end of the respective other strand forming the duplex structure. The hairpin loop can comprise at least one unpaired nucleotide; in some embodiments the hairpin loop can comprise at least 3, at least 4, at least 5, at least 6, at least 7, at least 8, at least 9, at least 10, at least 20, at least 23 or more unpaired nucleotides. Where the two substantially complementary strands of a dsRNA are comprised by separate RNA molecules, those molecules need not, but can be covalently connected. In some embodiments, the two strands are connected covalently by means other than a hairpin loop, and the connecting structure is a linker.

[0119] In some embodiments, the iRNA agent may be a “single-stranded siRNA” that is introduced into a cell or organism to inhibit a target mRNA. In some embodiments, single-stranded RNAi agents can bind to the RISC endonuclease Argonaute 2, which then cleaves the target mRNA. The single-stranded siRNAs are generally 15-30 nucleotides and are optionally chemically modified. The design and testing of single-stranded siRNAs are described in U.S. Pat. No. 8,101,348 and in Lima et al., (2012) Cell 150: 883-894, the entire contents of each of which are hereby incorporated herein by reference. Any of the antisense nucleotide sequences described herein (e.g., sequences provided in Tables 2A, 2B, 3A, 3B, 4A, 4B, 5A, or 5B) may be used as a single-stranded siRNA as described herein and optionally as chemically modified, e.g., as described herein, e.g., by the methods described in Lima et al., (2012) Cell 150:883-894.

[0120] In some embodiments, an RNA interference agent includes a single stranded RNA that interacts with a target RNA sequence to direct the cleavage of the target RNA. Without wishing to be bound by theory, long double stranded RNA introduced into cells is broken down into siRNA by a Type III endonuclease known as Dicer (Sharp et al., Genes Dev. 2001, 15:485). Dicer, a ribonuclease-III-like enzyme, processes the dsRNA into 19-23 base pair short interfering RNAs with characteristic two base 3′ overhangs (Bernstein, et al., (2001) Nature 409:363). The siRNAs are then incorporated into an RNA-induced silencing complex (RISC) where one or more helicases unwind the siRNA duplex, enabling the complementary antisense strand to guide target recognition (Nykanen, et al., (2001) Cell 107:309). Upon binding to the appropriate target mRNA, one or more endonucleases within the RISC cleaves the target to induce silencing (Elbashir, et al., (2001) Genes Dev. 15:188). Thus, in some embodiments, the disclosure relates to a single stranded RNA that promotes the formation of a RISC complex to effect silencing of the target gene.

[0121] “G,” “C,” “A,” “T” and “U” each generally stand for a nucleotide that contains guanine, cytosine, adenine, thymidine and uracil as a base, respectively. However, it will be understood that the terms “deoxyribonucleotide,” “ribonucleotide,” or “nucleotide” can also refer to a modified nucleotide, as further detailed below, or a surrogate replacement moiety. The skilled person is well aware that guanine, cytosine, adenine, and uracil may be replaced by other moieties without substantially altering the base pairing properties of an oligonucleotide comprising a nucleotide bearing such replacement moiety. For example, without limitation, a nucleotide comprising inosine as its base may base pair with nucleotides containing adenine, cytosine, or uracil. Hence, nucleotides containing uracil, guanine, or adenine may be replaced in the nucleotide sequences of dsRNA featured in the disclosure by a nucleotide containing, for example, inosine. In another example, adenine and cytosine anywhere in the oligonucleotide can be replaced with guanine and uracil, respectively to form G-U Wobble base pairing with the target mRNA. Sequences containing such replacement moieties are suitable for the compositions and methods featured in the disclosure.

[0122] As used herein, the term “iRNA,” “RNAi”, “iRNA agent,” or “RNAi agent” or “RNAi molecule” refers to an agent that contains RNA as that term is defined herein, and which mediates the targeted cleavage of an RNA transcript, e.g., via an RNA-induced silencing complex (RISC) pathway. In some embodiments, an iRNA as described herein effects inhibition of MYOC expression, e.g., in a cell or mammal. Inhibition of MYOC expression may be assessed based on a reduction in the level of MYOC mRNA or a reduction in the level of the MYOC protein.

[0123] The term “linker” or “linking group” means an organic moiety that connects two parts of a compound, e.g., covalently attaches two parts of a compound.

[0124] The term “lipophile” or “lipophilic moiety” broadly refers to any compound or chemical moiety having an affinity for lipids. One way to characterize the lipophilicity of the lipophilic moiety is by the octanol-water partition coefficient, logK_{ow}, where K_{ow} is the ratio of a chemical’s concentration in the octanol-phase to its concentration in the aqueous phase of a two-phase system at equilibrium. The octanol-water partition coefficient is a laboratory-measured property of a substance. However, it may also be predicted by using coefficients attributed to the structural components of a chemical which are calculated using first-principle or empirical methods (see, for example, Tetko et al., J. Chem. Inf. Comput. Sci. 41:1407-21 (2001), which is incorporated herein by reference in its entirety). It provides a thermodynamic measure of the tendency of the substance to prefer a non-aqueous or oily milieu rather than water (i.e. its hydrophilic/lipophilic balance). In principle, a chemical substance is lipophilic in character when its logK_{oW} exceeds 0. Typically, the lipophilic moiety possesses a logK_{oW} exceeding 1, exceeding 1.5, exceeding 2, exceeding 3, exceeding 4, exceeding 5, or exceeding 10. For instance, the logK_{ow} of 6-amino hexanol, for instance, is predicted to be approximately 0.7. Using the same method, the logK_{ow} of cholesteryl N-(hexan-6-ol) carbamate is predicted to be 10.7.

[0125] The lipophilicity of a molecule can change with respect to the functional group it carries. For instance, adding a hydroxyl group or amine group to the end of a lipophilic moiety can increase or decrease the partition coefficient (e.g., logK_{ow}) value of the lipophilic moiety.

[0126] Alternatively, the hydrophobicity of the double-stranded RNAi agent, conjugated to one or more lipophilic moieties, can be measured by its protein binding characteristics. For instance, in certain embodiments, the unbound fraction in the plasma protein binding assay of the double-stranded RNAi agent could be determined to positively correlate to the relative hydrophobicity of the double-stranded RNAi agent, which could then positively correlate to the silencing activity of the double-stranded RNAi agent.

[0127] In some embodiments, the plasma protein binding assay determined is an electrophoretic mobility shift assay (EMSA) using human serum albumin protein. An exemplary protocol of this binding assay is illustrated in detail in, e.g., PCT/US2019/031170. The hydrophobicity of the double-stranded RNAi agent, measured by fraction of unbound siRNA in the binding assay, exceeds 0.15, exceeds 0.2, exceeds 0.25, exceeds 0.3, exceeds 0.35, exceeds 0.4, exceeds 0.45, or exceeds 0.5 for an enhanced in vivo delivery of siRNA.

[0128] Accordingly, conjugating the lipophilic moieties to the internal position(s) of the double-stranded RNAi agent provides optimal hydrophobicity for the enhanced in vivo delivery of siRNA.

[0129] The term “lipid nanoparticle” or “LNP” is a vesicle comprising a lipid layer encapsulating a pharmaceutically active molecule, such as a nucleic acid molecule, e.g., a RNAi agent or a plasmid from which a RNAi agent is transcribed. LNPs are described in, for example, U.S. Pat. Nos. 6,858,225, 6,815,432, 8,158,601, and 8,058,069, the entire contents of which are hereby incorporated herein by reference.

[0130] As used herein, the term “modulate the expression of,” refers to an at least partial “inhibition” or partial “activation” of a gene (e.g., MYOC gene) expression in a cell treated with an iRNA composition as described herein compared to the expression of the corresponding gene in a control cell. A control cell includes an untreated cell, or a cell treated with a non-targeting control iRNA.

[0131] The skilled artisan will recognize that the term “RNA molecule” or “ribonucleic acid molecule” encompasses not only RNA molecules as expressed or found in nature, but also analogs and derivatives of RNA comprising one or more ribonucleotide/ribonucleoside analogs or derivatives as described herein or as known in the art. Strictly speaking, a “ribonucleoside” includes a nucleoside base and a ribose sugar, and a “ribonucleotide” is a ribonucleoside with one, two or three phosphate moieties or analogs thereof (e.g., phosphorothioate). However, the terms “ribonucleoside” and “ribonucleotide” can be considered to be equivalent as used herein. The RNA can be modified in the nucleobase structure, in the ribose structure, or in the ribose-phosphate backbone structure, e.g., as described herein below. However, the molecules comprising ribonucleoside analogs or derivatives must retain the ability to form a duplex. As non-limiting examples, an RNA molecule can also include at least one modified ribonucleoside including but not limited to a 2′-O-methyl modified nucleoside, a nucleoside comprising a 5′ phosphorothioate group, a terminal nucleoside linked to a cholesteryl derivative or dodecanoic acid bisdecylamide group, a locked nucleoside, an abasic nucleoside, an acyclic nucleoside, a glycol nucleotide, a 2′-deoxy-2′-fluoro modified nucleoside, a 2′-amino-modified nucleoside, 2′-alkyl-modified nucleoside, morpholino nucleoside, a phosphoramidate or a non-natural base comprising nucleoside, or any combination thereof. Alternatively, or in combination, an RNA molecule can comprise at least two modified ribonucleosides, at least 3, at least 4, at least 5, at least 6, at least 7, at least 8, at least 9, at least 10, at least 15, at least 20 or more, up to the entire length of the dsRNA molecule. The modifications need not be the same for each of such a plurality of modified ribonucleosides in an RNA molecule. In some embodiments, modified RNAs contemplated for use in methods and compositions described herein are peptide nucleic acids (PNAs) that have the ability to form the required duplex structure and that permit or mediate the specific degradation of a target RNA, e.g., via a RISC pathway. For clarity, it is understood that the term “iRNA” does not encompass a naturally occurring double stranded DNA molecule or a 100% deoxynucleoside-containing DNA molecule.

[0132] In some aspects, a modified ribonucleoside includes a deoxyribonucleoside. In such an instance, an iRNA agent can comprise one or more deoxynucleosides, including, for example, a deoxynucleoside overhang(s), or one or more deoxynucleosides within the double stranded portion of a dsRNA. In certain embodiments, the RNA molecule comprises a percentage of deoxyribonucleosides of at least 5, 10, 15, 20, 25, 30, 35, 40, 45, 50, 55, 60, 65, 70, 75, 80, 85, 90, 95% or higher (but not 100%) deoxyribonucleosides, e.g., in one or both strands.

[0133] As used herein, the term “nucleotide overhang” refers to at least one unpaired nucleotide that protrudes from the duplex structure of an iRNA, e.g., a dsRNA. For example, when a 3′ -end of one strand of a dsRNA extends beyond the 5′-end of the other strand, or vice versa, there is a nucleotide overhang. A dsRNA can comprise an overhang of at least one nucleotide; alternatively, the overhang can comprise at least two nucleotides, at least three nucleotides, at least four nucleotides, or at least five nucleotides or more. A nucleotide overhang can comprise or consist of a nucleotide/nucleoside analog, including a deoxynucleotide/nucleoside. The overhang(s) may be on the sense strand, the antisense strand or any combination thereof. Furthermore, the nucleotide(s) of an overhang can be present on the 5′ end, 3′ end or both ends of either an antisense or sense strand of a dsRNA.

[0134] In some embodiments, the antisense strand of a dsRNA has a 1-10 nucleotide overhang at the 3′ end and/or the 5′ end. In some embodiments, the sense strand of a dsRNA has a 1-10 nucleotide overhang at the 3′ end and/or the 5′ end. In some embodiments, one or more of the nucleotides in the overhang is replaced with a nucleoside thiophosphate.

[0135] As used herein, a “pharmaceutical composition” comprises a pharmacologically effective amount of a therapeutic agent (e.g., an iRNA) and a pharmaceutically acceptable carrier. As used herein, “pharmacologically effective amount,” “therapeutically effective amount” or simply “effective amount” refers to that amount of an agent (e.g., iRNA) effective to produce the intended pharmacological, therapeutic or preventive result. For example, in a method of treating a disorder related to MYOC expression (e.g., glaucoma, e.g., primary open angle glaucoma (POAG)), an effective amount includes an amount effective to reduce one or more symptoms associated with the disorder (e.g., an amount effective to ;; (a) inhibit or reduce the expression or activity of MYOC; (b) reduce the level of misfolded MYOC protein; (c) reduce trabecular meshwork cell death; (d) decrease intraocular pressure; or (e) increase visual acuity. For example, if a given clinical treatment is considered effective when there is at least a 10% reduction in a measurable parameter associated with a disease or disorder, a therapeutically effective amount of a drug for the treatment of that disease or disorder is the amount necessary to obtain at least a 10% reduction in that parameter. For example, a therapeutically effective amount of an iRNA targeting MYOC can reduce a level of MYOC mRNA or a level of MYOC protein by any measurable amount, e.g., by at least 10%, 15%, 20%, 25%, 30%, 35%, 40%, 45%, 50%, 55%, 60%, 65%, 70%, 75%, 80%, 85%, 90%, or 95%.

[0136] The term “pharmaceutically acceptable carrier” refers to a carrier for administration of a therapeutic agent. Such carriers include, but are not limited to, saline, buffered saline, dextrose, water, glycerol, ethanol, and combinations thereof. The term specifically excludes cell culture medium. For drugs administered orally, pharmaceutically acceptable carriers include, but are not limited to pharmaceutically acceptable excipients such as inert diluents, disintegrating agents, binding agents, lubricating agents, sweetening agents, flavoring agents, coloring agents and preservatives. Suitable inert diluents include sodium and calcium carbonate, sodium and calcium phosphate, and lactose, while corn starch and alginic acid are suitable disintegrating agents. Binding agents may include starch and gelatin, while the lubricating agent, if present, will generally be magnesium stearate, stearic acid or talc. If desired, the tablets may be coated with a material such as glyceryl monostearate or glyceryl distearate, to delay absorption in the gastrointestinal tract. Agents included in drug formulations are described further herein below.

[0137] As used herein, the term “SNALP” refers to a stable nucleic acid-lipid particle. A SNALP represents a vesicle of lipids coating a reduced aqueous interior comprising a nucleic acid such as an iRNA or a plasmid from which an iRNA is transcribed. SNALPs are described, e.g., in U.S. Pat. Application Publication Nos. 2006/0240093, 2007/0135372, and in International Application No. WO 2009/082817. These applications are incorporated herein by reference in their entirety. In some embodiments, the SNALP is a SPLP. As used herein, the term “SPLP” refers to a nucleic acid-lipid particle comprising plasmid DNA encapsulated within a lipid vesicle.

[0138] As used herein, the term “strand comprising a sequence” refers to an oligonucleotide comprising a chain of nucleotides that is described by the sequence referred to using the standard nucleotide nomenclature.

[0139] As used herein, a “subject” to be treated according to the methods described herein, includes a human or non-human animal, e.g., a mammal. The mammal may be, for example, a rodent (e.g., a rat or mouse) or a primate (e.g., a monkey). In some embodiments, the subject is a human.

[0140] A “subject in need thereof” includes a subject having, suspected of having, or at risk of developing a disorder related to MYOC expression, e.g., overexpression (e.g., glaucoma). In some embodiments, the subject has, or is suspected of having, a disorder related to MYOC expression or overexpression. In some embodiments, the subject is at risk of developing a disorder related to MYOC expression or overexpression.

[0141] As used herein, “target sequence” refers to a contiguous portion of the nucleotide sequence of an mRNA molecule formed during the transcription of a gene, e.g., MYOC, including mRNA that is a product of RNA processing of a primary transcription product. The target portion of the sequence will be at least long enough to serve as a substrate for iRNA-directed cleavage at or near that portion. For example, the target sequence will generally be from 9-36 nucleotides in length, e.g., 15-30 nucleotides in length, including all sub-ranges therebetween. As non-limiting examples, the target sequence can be from 15-30 nucleotides, 15-26 nucleotides, 15-23 nucleotides, 15-22 nucleotides, 15-21 nucleotides, 15-20 nucleotides, 15-19 nucleotides, 15-18 nucleotides, 15-17 nucleotides, 18-30 nucleotides, 18-26 nucleotides, 18-23 nucleotides, 18-22 nucleotides, 18-21 nucleotides, 18-20 nucleotides, 19-30 nucleotides, 19-26 nucleotides, 19-23 nucleotides, 19-22 nucleotides, 19-21 nucleotides, 19-20 nucleotides, 20-30 nucleotides, 20-26 nucleotides, 20-25 nucleotides, 20-24 nucleotides, 20-23 nucleotides, 20-22 nucleotides, 20-21 nucleotides, 21-30 nucleotides, 21-26 nucleotides, 21-25 nucleotides, 21-24 nucleotides, 21-23 nucleotides, or 21-22 nucleotides.

[0142] As used herein, the phrases “therapeutically effective amount” and “prophylactically effective amount” and the like refer to an amount that provides a therapeutic benefit in the treatment, prevention, or management of any disorder or pathological process related to MYOC expression (e.g., glaucoma, e.g., primary open angle glaucoma (POAG)). The specific amount that is therapeutically effective may vary depending on factors known in the art, such as, for example, the type of disorder or pathological process, the patient’s history and age, the stage of the disorder or pathological process, and the administration of other therapies.

[0143] In the context of the present disclosure, the terms “treat,” “treatment,” and the like mean to prevent, delay, relieve or alleviate at least one symptom associated with a disorder related to MYOC expression, or to slow or reverse the progression or anticipated progression of such a disorder. For example, the methods featured herein, when employed to treat an glaucoma, may serve to reduce or prevent one or more symptoms of the glaucoma, as described herein, or to reduce the risk or severity of associated conditions. Thus, unless the context clearly indicates otherwise, the terms “treat,” “treatment,” and the like are intended to encompass prophylaxis, e.g., prevention of disorders and/or symptoms of disorders related to MYOC expression. Treatment can also mean prolonging survival as compared to expected survival in the absence of treatment.

[0144] By “lower” in the context of a disease marker or symptom is meant any decrease, e.g., a statistically or clinically significant decrease in such level. The decrease can be, for example, at least 10%, at least 20%, at least 30%, at least 40%, at least 40%, at least 50%, at least 60%, at least 70%, at least 80%, or at least 90%. The decrease can be down to a level accepted as within the range of normal for an individual without such disorder.

[0145] As used herein, “MYOC” refers to “myocilin” the corresponding mRNA (“MYOC mRNA”), or the corresponding protein (“MYOC protein”). The sequence of a human MYOC mRNA transcript can be found at SEQ ID NO: 1.

### II. iRNA Agents

[0146] Described herein are iRNA agents that modulate (e.g., inhibit) the expression of MYOC.

[0147] In some embodiments, the iRNA agent activates the expression of MYOC in a cell or mammal.

[0148] In some embodiments, the iRNA agent includes double-stranded ribonucleic acid (dsRNA) molecules for inhibiting the expression of MYOC in a cell or in a subject (e.g., in a mammal, e.g., in a human), where the dsRNA includes an antisense strand having a region of complementarity which is complementary to at least a part of an mRNA formed in the expression of MYOC, and where the region of complementarity is 30 nucleotides or less in length, generally 19-24 nucleotides in length, and where the dsRNA, upon contact with a cell expressing MYOC, inhibits the expression of MYOC, e.g., by at least 10%, 20%, 30%, 40%, or 50%.

[0149] The modulation (e.g., inhibition) of expression of MYOC can be assayed by, for example, a PCR or branched DNA (bDNA)-based method, or by a protein-based method, such as by Western blot. Expression of MYOC in cell culture, such as in COS cells, ARPE-19 cells, hTERT RPE-1 cells, HeLa cells, primary hepatocytes, HepG2 cells, primary cultured cells or in a biological sample from a subject can be assayed by measuring MYOC mRNA levels, such as by bDNA or TaqMan assay, or by measuring protein levels, such as by immunofluorescence analysis, using, for example, Western Blotting or flow cytometric techniques.

[0150] A dsRNA typically includes two RNA strands that are sufficiently complementary to hybridize to form a duplex structure under conditions in which the dsRNA will be used. One strand of a dsRNA (the antisense strand) typically includes a region of complementarity that is substantially complementary, and generally fully complementary, to a target sequence, derived from the sequence of an mRNA formed during the expression of MYOC. The other strand (the sense strand) typically includes a region that is complementary to the antisense strand, such that the two strands hybridize and form a duplex structure when combined under suitable conditions. Generally, the duplex structure is between 15 and 30 inclusive, more generally between 18 and 25 inclusive, yet more generally between 19 and 24 inclusive, and most generally between 19 and 21 base pairs in length, inclusive. Similarly, the region of complementarity to the target sequence is between 15 and 30 inclusive, more generally between 18 and 25 inclusive, yet more generally between 19 and 24 inclusive, and most generally between 19 and 21 nucleotides in length, inclusive.

[0151] In some embodiments, the dsRNA is between 15 and 20 nucleotides in length, inclusive, and in other embodiments, the dsRNA is between 25 and 30 nucleotides in length, inclusive. As the ordinarily skilled person will recognize, the targeted region of an RNA targeted for cleavage will most often be part of a larger RNA molecule, often an mRNA molecule. Where relevant, a “part” of an mRNA target is a contiguous sequence of an mRNA target of sufficient length to be a substrate for RNAi-directed cleavage (i.e., cleavage through a RISC pathway). dsRNAs having duplexes as short as 9 base pairs can, under some circumstances, mediate RNAi-directed RNA cleavage. Most often a target will be at least 15 nucleotides in length, e.g., 15-30 nucleotides in length.

[0152] One of skill in the art will also recognize that the duplex region is a primary functional portion of a dsRNA, e.g., a duplex region of 9 to 36, e.g., 15-30 base pairs. Thus, in some embodiments, to the extent that it becomes processed to a functional duplex of e.g., 15-30 base pairs that targets a desired RNA for cleavage, an RNA molecule or complex of RNA molecules having a duplex region greater than 30 base pairs is a dsRNA. Thus, an ordinarily skilled artisan will recognize that in some embodiments, then, an miRNA is a dsRNA. In some embodiments, a dsRNA is not a naturally occurring miRNA. In some embodiments, an iRNA agent useful to target MYOC expression is not generated in the target cell by cleavage of a larger dsRNA.

[0153] A dsRNA as described herein may further include one or more single-stranded nucleotide overhangs. The dsRNA can be synthesized by standard methods known in the art as further discussed below, e.g., by use of an automated DNA synthesizer, such as are commercially available from, for example, Biosearch, Applied Biosystems, Inc.

[0154] In some embodiments, MYOC is a human MYOC.

[0155] In specific embodiments, the dsRNA comprises a sense strand that comprises or consists of a sense sequence selected from the sense sequences provided in Tables 2A, 2B, 3A, 3B, 4A, 4B, 5A, or 5B and an antisense strand that comprises or consists of an antisense sequence selected from the antisense sequences provided in Tables 2A, 2B, 3A, 3B, 4A, 4B, 5A, or 5B.

[0156] In some aspects, a dsRNA will include at least sense and antisense nucleotide sequences, whereby the sense strand is selected from the sequences provided in Tables 2A, 2B, 3A, 3B, 4A, 4B, 5A, or 5B and the corresponding antisense strand is selected from the sequences provided in Tables 2A, 2B, 3A, 3B, 4A, 4B, 5A, or 5B.

[0157] In these aspects, one of the two sequences is complementary to the other of the two sequences, with one of the sequences being substantially complementary to a sequence of an mRNA generated by the expression of MYOC. As such, a dsRNA will include two oligonucleotides, where one oligonucleotide is described as the sense strand, and the second oligonucleotide is described as the corresponding antisense strand. As described elsewhere herein and as known in the art, the complementary sequences of a dsRNA can also be contained as self-complementary regions of a single nucleic acid molecule, as opposed to being on separate oligonucleotides.

[0158] The skilled person is well aware that dsRNAs having a duplex structure of between 20 and 23, but specifically 21, base pairs have been hailed as particularly effective in inducing RNA interference (Elbashir et al., EMBO 2001, 20:6877-6888). However, others have found that shorter or longer RNA duplex structures can be effective as well.

[0159] In the embodiments described above, by virtue of the nature of the oligonucleotide sequences provided in Tables 2A, 2B, 3A, 3B, 4A, 4B, 5A, and 5B, dsRNAs described herein can include at least one strand of a length of minimally 19 nucleotides. It can be reasonably expected that shorter duplexes having one of the sequences of Tables 2A, 2B, 3A, 3B, 4A, 4B, 5A, and 5B minus only a few nucleotides on one or both ends will be similarly effective as compared to the dsRNAs described above.

[0160] In some embodiments, the dsRNA has a partial sequence of at least 15, 16, 17, 18, 19, 20, or more contiguous nucleotides from one of the sequences of Tables 2A, 2B, 3A, 3B, 4A, 4B, 5A, or 5B.

[0161] In some embodiments, the dsRNA has an antisense sequence that comprises at least 15, 16, 17, 18, or 19 contiguous nucleotides of an antisense sequence provided in Tables 2A, 2B, 3A, 3B, 4A, 4B, 5A, or 5B and a sense sequence that comprises at least 15, 16, 17, 18, or 19 contiguous nucleotides of a corresponding sense sequence provided in Tables 2A, 2B, 3A, 3B, 4A, 4B, 5A, or 5B.

[0162] In some embodiments, the dsRNA comprises an antisense sequence that comprises at least 15, 16, 17, 18, 19, 20, 21, 22, or 23 contiguous nucleotides of an antisense sequence provided in Tables 2A, 2B, 3A, 3B, 4A, 4B, 5A, or 5B and a sense sequence that comprises at least 15, 16, 17, 18, 19, 20, or 21 contiguous nucleotides of a corresponding sense sequence provided in Tables 2A, 2B, 3A, 3B, 4A, 4B, 5A, or 5B.

[0163] In some such embodiments, the dsRNA, although it comprises only a portion of the sequences provided in Tables 2A, 2B, 3A, 3B, 4A, 4B, 5A, or 5B is equally effective in inhibiting a level of MYOC expression as is a dsRNA that comprises the full-length sequences provided in Tables 2A, 2B, 3A, 3B, 4A, 4B, 5A, or 5B. In some embodiments, the dsRNA differs in its inhibition of a level of expression of MYOC by not more than 5, 10, 15, 20, 25, 30, 35, 40, 45, or 50 % inhibition compared with a dsRNA comprising the full sequence disclosed herein.

[0164] In some embodiments, an iRNA described herein comprises an antisense strand comprising at least 15 contiguous nucleotides, with 0, 1, 2, or 3 mismatches, of a portion of nucleotide sequence of SEQ ID NO: 2. In some embodiments, an iRNA described herein comprises a sense strand comprising at least 15 contiguous nucleotides, with 0, or 1, 2, or 3 mismatches, of the corresponding portion of the nucleotide sequence of SEQ ID NO: 1.

[0165] A human MYOC mRNA may have the sequence of SEQ ID NO: 1 provided herein. Homo sapiens myocilin (MYOC), mRNA

GAGCCAGCAAGGCCACCCATCCAGGCACCTCTCAGCACAGCAGAGCTTTC
CAGAGGAAGCCTCACCAAGCCTCTGCAATGAGGTTCTTCTGTGCACGTTG
CTGCAGCTTTGGGCCTGAGATGCCAGCTGTCCAGCTGCTGCTTCTGGCCT
GCCTGGTGTGGGATGTGGGGGCCAGGACAGCTCAGCTCAGGAAGGCCAAT
GACCAGAGTGGCCGATGCCAGTATACCTTCAGTGTGGCCAGTCCCAATGA
ATCCAGCTGCCCAGAGCAGAGCCAGGCCATGTCAGTCATCCATAACTTAC
AGAGAGACAGCAGCACCCAACGCTTAGACCTGGAGGCCACCAAAGCTCGA
CTCAGCTCCCTGGAGAGCCTCCTCCACCAATTGACCTTGGACCAGGCTGC
CAGGCCCCAGGAGACCCAGGAGGGGCTGCAGAGGGAGCTGGGCACCCTGA
GGCGGGAGCGGGACCAGCTGGAAACCCAAACCAGAGAGTTGGAGACTGCC
TACAGCAACCTCCTCCGAGACAAGTCAGTTCTGGAGGAAGAGAAGAAGCG
ACTAAGGCAAGAAAATGAGAATCTGGCCAGGAGGTTGGAAAGCAGCAGCC
AGGAGGTAGCAAGGCTGAGAAGGGGCCAGTGTCCCCAGACCCGAGACACT
GCTCGGGCTGTGCCACCAGGCTCCAGAGAAGTTTCTACGTGGAATTTGGA
CACTTTGGCCTTCCAGGAACTGAAGTCCGAGCTAACTGAAGTTCCTGCTT
CCCGAATTTTGAAGGAGAGCCCATCTGGCTATCTCAGGAGTGGAGAGGGA
GACACCGGATGTGGAGAACTAGTTTGGGTAGGAGAGCCTCTCACGCTGAG
AACAGCAGAAACAATTACTGGCAAGTATGGTGTGTGGATGCGAGACCCCA
AGCCCACCTACCCCTACACCCAGGAGACCACGTGGAGAATCGACACAGTT
GGCACGGATGTCCGCCAGGTTTTTGAGTATGACCTCATCAGCCAGTTTAT
GCAGGGCTACCCTTCTAAGGTTCACATACTGCCTAGGCCACTGGAAAGCA
CGGGTGCTGTGGTGTACTCGGGGAGCCTCTATTTCCAGGGCGCTGAGTCC
AGAACTGTCATAAGATATGAGCTGAATACCGAGACAGTGAAGGCTGAGAA
GGAAATCCCTGGAGCTGGCTACCACGGACAGTTCCCGTATTCTTGGGGTG
GCTACACGGACATTGACTTGGCTGTGGATGAAGCAGGCCTCTGGGTCATT
TACAGCACCGATGAGGCCAAAGGTGCCATTGTCCTCTCCAAACTGAACCC
AGAGAATCTGGAACTCGAACAAACCTGGGAGACAAACATCCGTAAGCAGT
CAGTCGCCAATGCCTTCATCATCTGTGGCACCTTGTACACCGTCAGCAGC
TACACCTCAGCAGATGCTACCGTCAACTTTGCTTATGACACAGGCACAGG
TATCAGCAAGACCCTGACCATCCCATTCAAGAACCGCTATAAGTACAGCA
GCATGATTGACTACAACCCCCTGGAGAAGAAGCTCTTTGCCTGGGACAAC
TTGAACATGGTCACTTATGACATCAAGCTCTCCAAGATGTGAAAAGCCTC
CAAGCTGTACAGGCAATGGCAGAAGGAGATGCTCAGGGCTCCTGGGGGGA
GCAGGCTGAAGGGAGAGCCAGCCAGCCAGGGCCCAGGCAGCTTTGACTGC
TTTCCAAGTTTTCATTAATCCAGAAGGATGAACATGGTCACCATCTAACT
ATTCAGGAATTGTAGTCTGAGGGCGTAGACAATTTCATATAATAAATATC
CTTTATCTTCTGTCAGCATTTATGGGATGTTTAATGACATAGTTCAAGTT
TTCTTGTGATTTGGGGCAAAAGCTGTAAGGCATAATAGTTTCTTCCTGAA
AACCATTGCTCTTGCATGTTACATGGTTACCACAAGCCACAATAAAAAGC
ATAACTTCTAAAGGAAGCAGAATAGCTCCTCTGGCCAGCATCGAATATAA
GTAAGATGCATTTACTACAGTTGGCTTCTAATGCTTCAGATAGAATACAG
TTGGGTCTCACATAACCCTTTACATTGTGAAATAAAATTTTCTTACCCAA
(SEQ ID NO: 1)

[0166] The reverse complement of SEQ ID NO: 1 is provided as SEQ ID NO: 2 herein:

TTGGGTAAGAAAATTTTATTTCACAATGTAAAGGGTTATGTGAGACCCAA
CTGTATTCTATCTGAAGCATTAGAAGCCAACTGTAGTAAATGCATCTTAC
TTATATTCGATGCTGGCCAGAGGAGCTATTCTGCTTCCTTTAGAAGTTAT
GCTTTTTATTGTGGCTTGTGGTAACCATGTAACATGCAAGAGCAATGGTT
TTCAGGAAGAAACTATTATGCCTTACAGCTTTTGCCCCAAATCACAAGAA
AACTTGAACTATGTCATTAAACATCCCATAAATGCTGACAGAAGATAAAG
GATATTTATTATATGAAATTGTCTACGCCCTCAGACTACAATTCCTGAAT
AGTTAGATGGTGACCATGTTCATCCTTCTGGATTAATGAAAACTTGGAAA
GCAGTCAAAGCTGCCTGGGCCCTGGCTGGCTGGCTCTCCCTTCAGCCTGC
TCCCCCCAGGAGCCCTGAGCATCTCCTTCTGCCATTGCCTGTACAGCTTG
GAGGCTTTTCACATCTTGGAGAGCTTGATGTCATAAGTGACCATGTTCAA
GTTGTCCCAGGCAAAGAGCTTCTTCTCCAGGGGGTTGTAGTCAATCATGC
TGCTGTACTTATAGCGGTTCTTGAATGGGATGGTCAGGGTCTTGCTGATA
CCTGTGCCTGTGTCATAAGCAAAGTTGACGGTAGCATCTGCTGAGGTGTA
GCTGCTGACGGTGTACAAGGTGCCACAGATGATGAAGGCATTGGCGACTG
ACTGCTTACGGATGTTTGTCTCCCAGGTTTGTTCGAGTTCCAGATTCTCT
GGGTTCAGTTTGGAGAGGACAATGGCACCTTTGGCCTCATCGGTGCTGTA
AATGACCCAGAGGCCTGCTTCATCCACAGCCAAGTCAATGTCCGTGTAGC
CACCCCAAGAATACGGGAACTGTCCGTGGTAGCCAGCTCCAGGGATTTCC
TTCTCAGCCTTCACTGTCTCGGTATTCAGCTCATATCTTATGACAGTTCT
GGACTCAGCGCCCTGGAAATAGAGGCTCCCCGAGTACACCACAGCACCCG
TGCTTTCCAGTGGCCTAGGCAGTATGTGAACCTTAGAAGGGTAGCCCTGC
ATAAACTGGCTGATGAGGTCATACTCAAAAACCTGGCGGACATCCGTGCC
AACTGTGTCGATTCTCCACGTGGTCTCCTGGGTGTAGGGGTAGGTGGGCT
TGGGGTCTCGCATCCACACACCATACTTGCCAGTAATTGTTTCTGCTGTT
CTCAGCGTGAGAGGCTCTCCTACCCAAACTAGTTCTCCACATCCGGTGTC
TCCCTCTCCACTCCTGAGATAGCCAGATGGGCTCTCCTTCAAAATTCGGG
AAGCAGGAACTTCAGTTAGCTCGGACTTCAGTTCCTGGAAGGCCAAAGTG
TCCAAATTCCACGTAGAAACTTCTCTGGAGCCTGGTGGCACAGCCCGAGC
AGTGTCTCGGGTCTGGGGACACTGGCCCCTTCTCAGCCTTGCTACCTCCT
GGCTGCTGCTTTCCAACCTCCTGGCCAGATTCTCATTTTCTTGCCTTAGT
CGCTTCTTCTCTTCCTCCAGAACTGACTTGTCTCGGAGGAGGTTGCTGTA
GGCAGTCTCCAACTCTCTGGTTTGGGTTTCCAGCTGGTCCCGCTCCCGCC
TCAGGGTGCCCAGCTCCCTCTGCAGCCCCTCCTGGGTCTCCTGGGGCCTG
GCAGCCTGGTCCAAGGTCAATTGGTGGAGGAGGCTCTCCAGGGAGCTGAG
TCGAGCTTTGGTGGCCTCCAGGTCTAAGCGTTGGGTGCTGCTGTCTCTCT
GTAAGTTATGGATGACTGACATGGCCTGGCTCTGCTCTGGGCAGCTGGAT
TCATTGGGACTGGCCACACTGAAGGTATACTGGCATCGGCCACTCTGGTC
ATTGGCCTTCCTGAGCTGAGCTGTCCTGGCCCCCACATCCCACACCAGGC
AGGCCAGAAGCAGCAGCTGGACAGCTGGCATCTCAGGCCCAAAGCTGCAG
CAACGTGCACAGAAGAACCTCATTGCAGAGGCTTGGTGAGGCTTCCTCTG
GAAAGCTCTGCTGTGCTGAGAGGTGCCTGGATGGGTGGCCTTGCTGGCTC
(SEQ ID NO: 2)

[0167] In some embodiments, an iRNA described herein includes at least 15 contiguous nucleotides from one of the sequences provided in Tables 2A, 2B, 3A, 3B, 4A, 4B, 5A, and 5B, and may optionally be coupled to additional nucleotide sequences taken from the region contiguous to the selected sequence in MYOC.

[0168] While a target sequence is generally 15-30 nucleotides in length, there is wide variation in the suitability of particular sequences in this range for directing cleavage of any given target RNA. Various software packages and the guidelines set out herein provide guidance for the identification of optimal target sequences for any given gene target, but an empirical approach can also be taken in which a “window” or “mask” of a given size (as a non-limiting example, 21 nucleotides) is literally or figuratively (including, e.g., in silico) placed on the target RNA sequence to identify sequences in the size range that may serve as target sequences. By moving the sequence “window” progressively one nucleotide upstream or downstream of an initial target sequence location, the next potential target sequence can be identified, until the complete set of possible sequences is identified for any given target size selected. This process, coupled with systematic synthesis and testing of the identified sequences (using assays described herein or known in the art) to identify those sequences that perform optimally can identify those RNA sequences that, when targeted with an iRNA agent, mediate the best inhibition of target gene expression. Thus, it is contemplated that further optimization of inhibition efficiency can be achieved by progressively “walking the window” one nucleotide upstream or downstream of the given sequences to identify sequences with equal or better inhibition characteristics.

[0169] Further, it is contemplated that for any sequence identified, e.g., in Tables 2A, 2B, 3A, 3B, 4A, 4B, 5A, and 5B, further optimization can be achieved by systematically either adding or removing nucleotides to generate longer or shorter sequences and testing those and sequences generated by walking a window of the longer or shorter size up or down the target RNA from that point. Again, coupling this approach to generating new candidate targets with testing for effectiveness of iRNAs based on those target sequences in an inhibition assay as known in the art or as described herein can lead to further improvements in the efficiency of inhibition. Further still, such optimized sequences can be adjusted by, e.g., the introduction of modified nucleotides as described herein or as known in the art, addition or changes in overhang, or other modifications as known in the art and/or discussed herein to further optimize the molecule (e.g., increasing serum stability or circulating half-life, increasing thermal stability, enhancing transmembrane delivery, targeting to a particular location or cell type, increasing interaction with silencing pathway enzymes, increasing release from endosomes, etc.) as an expression inhibitor.

[0170] In some embodiments, the disclosure provides an iRNA of any of Tables 2B, 3B, 4B, or 5B that un-modified or un-conjugated. In some embodiments, an RNAi agent of the disclosure has a nucleotide sequence as provided in any of Tables 2A, 3A, 4A, and 5A, but lacks one or more ligand or moiety shown in the table. A ligand or moiety (e.g., a lipophilic ligand or moiety) can be included in any of the positions provided in the instant application.

[0171] An iRNA as described herein can contain one or more mismatches to the target sequence. In some embodiments, an iRNA as described herein contains no more than 3 mismatches. In some embodiments, when the antisense strand of the iRNA contains mismatches to a target sequence, the area of mismatch is not located in the center of the region of complementarity. In some embodiments, when the antisense strand of the iRNA contains mismatches to the target sequence, the mismatch is restricted to be within the last 5 nucleotides from either the 5′ or 3′ end of the region of complementarity. For example, for a 23 nucleotide iRNA agent RNA strand which is complementary to a region of MYOC, the RNA strand generally does not contain any mismatch within the central 13 nucleotides. The methods described herein, or methods known in the art can be used to determine whether an iRNA containing a mismatch to a target sequence is effective in inhibiting the expression of MYOC. Consideration of the efficacy of iRNAs with mismatches in inhibiting expression of MYOC is important, especially if the particular region of complementarity in a MYOC gene is known to have polymorphic sequence variation within the population.

[0172] In some embodiments, at least one end of a dsRNA has a single-stranded nucleotide overhang of 1 to 4, generally 1 or 2 nucleotides. In some embodiments, dsRNAs having at least one nucleotide overhang have superior inhibitory properties relative to their blunt-ended counterparts. In some embodiments, the RNA of an iRNA (e.g., a dsRNA) is chemically modified to enhance stability or other beneficial characteristics. The nucleic acids featured in the disclosure may be synthesized and/or modified by methods well established in the art, such as those described in “Current protocols in nucleic acid chemistry,” Beaucage, S.L. et al. (Edrs.), John Wiley & Sons, Inc., New York, NY, USA, which is hereby incorporated herein by reference. Modifications include, for example, (a) end modifications, e.g., 5′ end modifications (phosphorylation, conjugation, inverted linkages, etc.) 3′ end modifications (conjugation, DNA nucleotides, inverted linkages, etc.), (b) base modifications, e.g., replacement with stabilizing bases, destabilizing bases, or bases that base pair with an expanded repertoire of partners, removal of bases (abasic nucleotides), or conjugated bases, (c) sugar modifications (e.g., at the 2′ position or 4′ position, or having an acyclic sugar) or replacement of the sugar, as well as (d) backbone modifications, including modification or replacement of the phosphodiester linkages. Specific examples of RNA compounds useful in this disclosure include, but are not limited to, RNAs containing modified backbones or no natural internucleoside linkages. RNAs having modified backbones include, among others, those that do not have a phosphorus atom in the backbone. For the purposes of this specification, and as sometimes referenced in the art, modified RNAs that do not have a phosphorus atom in their internucleoside backbone can also be considered to be oligonucleosides. In particular embodiments, the modified RNA will have a phosphorus atom in its internucleoside backbone.

[0173] Modified RNA backbones include, for example, phosphorothioates, chiral phosphorothioates, phosphorodithioates, phosphotriesters, aminoalkylphosphotriesters, methyl and other alkyl phosphonates including 3′-alkylene phosphonates and chiral phosphonates, phosphinates, phosphoramidates including 3′-amino phosphoramidate and aminoalkylphosphoramidates, thionophosphoramidates, thionoalkylphosphonates, thionoalkylphosphotriesters, and boranophosphates having normal 3′-5′ linkages, 2′-5′ linked analogs of these, and those) having inverted polarity wherein the adjacent pairs of nucleoside units are linked 3′-5′ to 5′-3′ or 2′-5′ to 5′-2′. Various salts, mixed salts and free acid forms are also included.

[0174] Representative U.S. Pats. that teach the preparation of the above phosphorus-containing linkages include, but are not limited to, U.S. Pat. Nos. 3,687,808; 4,469,863; 4,476,301; 5,023,243; 5,177,195; 5,188,897; 5,264,423; 5,276,019; 5,278,302; 5,286,717; 5,321,131; 5,399,676; 5,405,939; 5,453,496; 5,455,233; 5,466,677; 5,476,925; 5,519,126; 5,536,821; 5,541,316; 5,550,111; 5,563,253; 5,571,799; 5,587,361; 5,625,050; 6,028,188; 6,124,445; 6,160,109; 6,169,170; 6,172,209; 6,239,265; 6,277,603; 6,326,199; 6,346,614; 6,444,423; 6,531,590; 6,534,639; 6,608,035; 6,683,167; 6,858,715; 6,867,294; 6,878,805; 7,015,315; 7,041,816; 7,273,933; 7,321,029; and U.S. Pat. RE39464, each of which is herein incorporated by reference.

[0175] Modified RNA backbones that do not include a phosphorus atom therein have backbones that are formed by short chain alkyl or cycloalkyl internucleoside linkages, mixed heteroatoms and alkyl or cycloalkyl internucleoside linkages, or one or more short chain heteroatomic or heterocyclic internucleoside linkages. These include those having morpholino linkages (formed in part from the sugar portion of a nucleoside); siloxane backbones; sulfide, sulfoxide and sulfone backbones; formacetyl and thioformacetyl backbones; methylene formacetyl and thioformacetyl backbones; alkene containing backbones; sulfamate backbones; methyleneimino and methylenehydrazino backbones; sulfonate and sulfonamide backbones; amide backbones; and others having mixed N, O, S and CH₂ component parts.

[0176] Representative U.S. Pats. that teach the preparation of the above oligonucleosides include, but are not limited to, U.S. Pat. Nos. 5,034,506; 5,166,315; 5,185,444; 5,214,134; 5,216,141; 5,235,033; 5,64,562; 5,264,564; 5,405,938; 5,434,257; 5,466,677; 5,470,967; 5,489,677; 5,541,307; 5,561,225; 5,596,086; 5,602,240; 5,608,046; 5,610,289; 5,618,704; 5,623,070; 5,663,312; 5,633,360; 5,677,437; and, 5,677,439, each of which is herein incorporated by reference.

[0177] In other RNA mimetics suitable or contemplated for use in iRNAs, both the sugar and the internucleoside linkage, i.e., the backbone, of the nucleotide units are replaced with novel groups. The base units are maintained for hybridization with an appropriate nucleic acid target compound. One such oligomeric compound, an RNA mimetic that has been shown to have excellent hybridization properties, is referred to as a peptide nucleic acid (PNA). In PNA compounds, the sugar backbone of an RNA is replaced with an amide containing backbone, in particular an aminoethylglycine backbone. The nucleobases are retained and are bound directly or indirectly to aza nitrogen atoms of the amide portion of the backbone. Representative U.S. Pats. that teach the preparation of PNA compounds include, but are not limited to, U.S. Pat. Nos. 5,539,082; 5,714,331; and 5,719,262, each of which is herein incorporated by reference. Further teaching of PNA compounds can be found, for example, in Nielsen et al., Science, 1991, 254, 1497-1500.

[0178] Some embodiments featured in the disclosure include RNAs with phosphorothioate backbones and oligonucleosides with heteroatom backbones, and in particular —CH₂—NH—CH₂—, —CH₂—N(CH₃)—O—CH₂—[known as a methylene (methylimino) or MMI backbone], —CH₂—O—N(CH₃)—CH₂—, —CH₂—N(CH₃)—N(CH₃)—CH₂— and —N(CH₃)—CH₂—CH₂—[wherein the native phosphodiester backbone is represented as —O—P—O—CH₂₋₋] of the above-referenced U.S. Pat. No. 5,489,677, and the amide backbones of the above-referenced U.S. Pat. No. 5,602,240. In some embodiments, the RNAs featured herein have morpholino backbone structures of the above-referenced U.S. Pat. No. 5,034,506.

[0179] Modified RNAs may also contain one or more substituted sugar moieties. The iRNAs, e.g., dsRNAs, featured herein can include one of the following at the 2′ position: OH; F; O—, S—, or N-alkyl; O—, S—, or N-alkenyl; O—, S— or N-alkynyl; or O-alkyl-O-alkyl, wherein the alkyl, alkenyl and alkynyl may be substituted or unsubstituted C₁ to C₁₀ alkyl or C₂ to C₁₀ alkenyl and alkynyl. Exemplary suitable modifications include O[(CH₂)ₙO] ₘCH₃, O(CH₂).ₙOCH₃, O(CH₂)ₙNH₂, O(CH₂) ₙCH₃, O(CH₂)ₙONH₂, and O(CH₂)ₙON[(CH₂)ₙCH₃)]₂, where n and m are from 1 to about 10. In other embodiments, dsRNAs include one of the following at the 2′ position: C₁ to C₁₀ lower alkyl, substituted lower alkyl, alkaryl, aralkyl, O-alkaryl or O-aralkyl, SH, SCH₃, OCN, C1, Br, CN, CF₃, OCF₃, SOCH₃, SO₂CH₃, ONO₂, NO₂, N₃, NH₂, heterocycloalkyl, heterocycloalkaryl, aminoalkylamino, polyalkylamino, substituted silyl, an RNA cleaving group, a reporter group, an intercalator, a group for improving the pharmacokinetic properties of an iRNA, or a group for improving the pharmacodynamic properties of an iRNA, and other substituents having similar properties. In some embodiments, the modification includes a 2′-methoxyethoxy (2′—O—CH₂CH₂OCH₃, also known as 2′-O-(2-methoxyethyl) or 2′-MOE) (Martin et al., Helv. Chim. Acta, 1995, 78:486-504) i.e., an alkoxy-alkoxy group. Another exemplary modification is 2′-dimethylaminooxyethoxy, i.e., a O(CH₂)₂ON(CH₃)₂ group, also known as 2′-DMAOE, and 2′-dimethylaminoethoxyethoxy (also known in the art as 2′-O-dimethylaminoethoxyethyl or 2′-DMAEOE), i.e., 2′—O—CH₂—O—CH₂—N(CH₂)₂.

[0180] In other embodiments, an iRNA agent comprises one or more (e.g., about 1, 2, 3, 4, 5, 6, 7, 8, 9, 10, or more) acyclic nucleotides (or nucleosides). In certain embodiments, the sense strand or the antisense strand, or both sense strand and antisense strand, include less than five acyclic nucleotides per strand (e.g., four, three, two or one acyclic nucleotides per strand). The one or more acyclic nucleotides can be found, for example, in the double-stranded region, of the sense or antisense strand, or both strands; at the 5′-end, the 3′-end, both of the 5′ and 3′-ends of the sense or antisense strand, or both strands, of the iRNA agent. In some embodiments, one or more acyclic nucleotides are present at positions 1 to 8 of the sense or antisense strand, or both. In some embodiments, one or more acyclic nucleotides are found in the antisense strand at positions 4 to 10 (e.g., positions 6-8) from the 5′-end of the antisense strand. In some embodiments, the one or more acyclic nucleotides are found at one or both 3′-terminal overhangs of the iRNA agent.

[0181] The term “acyclic nucleotide” or “acyclic nucleoside” as used herein refers to any nucleotide or nucleoside having an acyclic sugar, e.g., an acyclic ribose. An exemplary acyclic nucleotide or nucleoside can include a nucleobase, e.g., a naturally occurring or a modified nucleobase (e.g., a nucleobase as described herein). In certain embodiments, a bond between any of the ribose carbons (C1, C2, C3, C4, or C5), is independently or in combination absent from the nucleotide. In some embodiments, the bond between C2-C3 carbons of the ribose ring is absent, e.g., an acyclic 2′-3′-seco-nucleotide monomer. In other embodiments, the bond between C1-C2, C3-C4, or C4-C5 is absent (e.g., a 1′-2′, 3′-4′ or 4′-5′-seco nucleotide monomer). Exemplary acyclic nucleotides are disclosed in US 8,314,227, incorporated herein by reference in its entirely. For example, an acyclic nucleotide can include any of monomers D-J in Figures 1-2 of US 8,314,227. In some embodiments, the acyclic nucleotide includes the following monomer:

[chemical structure]

wherein Base is a nucleobase, e.g., a naturally occurring or a modified nucleobase (e.g., a nucleobase as described herein).

[0182] In certain embodiments, the acyclic nucleotide can be modified or derivatized, e.g., by coupling the acyclic nucleotide to another moiety, e.g., a ligand (e.g., a GalNAc, a cholesterol ligand), an alkyl, a polyamine, a sugar, a polypeptide, among others.

[0183] In other embodiments, the iRNA agent includes one or more acyclic nucleotides and one or more LNAs (e.g., an LNA as described herein). For example, one or more acyclic nucleotides and/or one or more LNAs can be present in the sense strand, the antisense strand, or both. The number of acyclic nucleotides in one strand can be the same or different from the number of LNAs in the opposing strand. In certain embodiments, the sense strand and/or the antisense strand comprises less than five LNAs (e.g., four, three, two or one LNAs) located in the double stranded region or a 3′-overhang. In other embodiments, one or two LNAs are located in the double stranded region or the 3′-overhang of the sense strand. Alternatively, or in combination, the sense strand and/or antisense strand comprises less than five acyclic nucleotides (e.g., four, three, two or one acyclic nucleotides) in the double-stranded region or a 3′-overhang. In some embodiments, the sense strand of the iRNA agent comprises one or two LNAs in the 3′-overhang of the sense strand, and one or two acyclic nucleotides in the double-stranded region of the antisense strand (e.g., at positions 4 to 10 (e.g., positions 6-8) from the 5′-end of the antisense strand) of the iRNA agent.

[0184] In other embodiments, inclusion of one or more acyclic nucleotides (alone or in addition to one or more LNAs) in the iRNA agent results in one or more (or all) of: (i) a reduction in an off-target effect; (ii) a reduction in passenger strand participation in RNAi; (iii) an increase in specificity of the guide strand for its target mRNA; (iv) a reduction in a microRNA off-target effect; (v) an increase in stability; or (vi) an increase in resistance to degradation, of the iRNA molecule.

[0185] Other modifications include 2′-methoxy (2′—OCH₃), 2′-5 aminopropoxy (2′—OCH₂CH₂CH₂NH₂) and 2′-fluoro (2′-F). Similar modifications may also be made at other positions on the RNA of an iRNA, particularly the 3′ position of the sugar on the 3′ terminal nucleotide or in 2′-5′ linked dsRNAs and the 5′ position of 5′ terminal nucleotide. iRNAs may also have sugar mimetics such as cyclobutyl moieties in place of the pentofuranosyl sugar. Representative U.S. Pats. that teach the preparation of such modified sugar structures include, but are not limited to, U.S. Pat. Nos. 4,981,957; 5,118,800; 5,319,080; 5,359,044; 5,393,878; 5,446,137; 5,466,786; 5,514,785; 5,519,134; 5,567,811; 5,576,427; 5,591,722; 5,597,909; 5,610,300; 5,627,053; 5,639,873; 5,646,265; 5,658,873; 5,670,633; and 5,700,920, certain of which are commonly owned with the instant application, and each of which is herein incorporated by reference.

[0186] An iRNA may also include nucleobase (often referred to in the art simply as “base”) modifications or substitutions. As used herein, “unmodified” or “natural” nucleobases include the purine bases adenine (A) and guanine (G), and the pyrimidine bases thymine (T), cytosine (C) and uracil (U). Modified nucleobases include other synthetic and natural nucleobases such as 5-methylcytosine (5-me-C), 5-hydroxymethyl cytosine, xanthine, hypoxanthine, 2-aminoadenine, 6-methyl and other alkyl derivatives of adenine and guanine, 2-propyl and other alkyl derivatives of adenine and guanine, 2-thiouracil, 2-thiothymine and 2-thiocytosine, 5-halouracil and cytosine, 5-propynyl uracil and cytosine, 6-azo uracil, cytosine and thymine, 5-uracil (pseudouracil), 4-thiouracil, 8-halo, 8-amino, 8-thiol, 8-thioalkyl, 8-hydroxyl anal other 8-substituted adenines and guanines, 5-halo, particularly 5-bromo, 5-trifluoromethyl and other 5-substituted uracils and cytosines, 7-methylguanine and 7-methyladenine, 8-azaguanine and 8-azaadenine, 7-deazaguanine and 7-daazaadenine and 3-deazaguanine and 3-deazaadenine.

[0187] Further nucleobases include those disclosed in U.S. Pat. No. 3,687,808, those disclosed in Modified Nucleosides in Biochemistry, Biotechnology and Medicine, Herdewijn, P. ed. Wiley-VCH, 2008; those disclosed in The Concise Encyclopedia of Polymer Science and Engineering, pages 858-859, Kroschwitz, J. L, ed. John Wiley & Sons, 1990, these disclosed by Englisch et al., Angewandte Chemie, International Edition, 1991, 30, 613, and those disclosed by Sanghvi, Y S., Chapter 15, dsRNA Research and Applications, pages 289-302, Crooke, S. T. and Lebleu, B., Ed., CRC Press, 1993. Certain of these nucleobases are particularly useful for increasing the binding affinity of the oligomeric compounds featured in the disclosure. These include 5-substituted pyrimidines, 6-azapyrimidines and N-2, N-6 and 0-6 substituted purines, including 2-aminopropyladenine, 5-propynyluracil and 5-propynylcytosine. 5-methylcytosine substitutions have been shown to increase nucleic acid duplex stability by 0.6-1.2° C. (Sanghvi, Y. S., Crooke, S. T. and Lebleu, B., Eds., dsRNA Research and Applications, CRC Press, Boca Raton, 1993, pp. 276-278) and are exemplary base substitutions, even more particularly when combined with 2′-O-methoxyethyl sugar modifications.

[0188] Representative U.S. Pats. that teach the preparation of certain of the above noted modified nucleobases as well as other modified nucleobases include, but are not limited to, the above noted U.S. Pat. No. 3,687,808, as well as U.S. Pat. Nos. 4,845,205; 5,130,30; 5,134,066; 5,175,273; 5,367,066; 5,432,272; 5,457,187; 5,459,255; 5,484,908; 5,502,177; 5,525,711; 5,552,540; 5,587,469; 5,594,121, 5,596,091; 5,614,617; 5,681,941; 6,015,886; 6,147,200; 6,166,197; 6,222,025; 6,235,887; 6,380,368; 6,528,640; 6,639,062; 6,617,438; 7,045,610; 7,427,672; and 7,495,088, each of which is herein incorporated by reference, and U.S. Pat. No. 5,750,692, also herein incorporated by reference.

[0189] The RNA of an iRNA can also be modified to include one or more (e.g., about 1, 2, 3, 4, 5, 6, 7, 8, 9, 10, or more) bicyclic sugar moieties. A “bicyclic sugar” is a furanosyl ring modified by the bridging of two atoms. A “bicyclic nucleoside” (“BNA”) is a nucleoside having a sugar moiety comprising a bridge connecting two carbon atoms of the sugar ring, thereby forming a bicyclic ring system. In certain embodiments, the bridge connects the 4′-carbon and the 2′-carbon of the sugar ring. Thus, in some embodiments an agent of the disclosure may include one or more locked nucleic acids (LNAs) (also referred to herein as “locked nucleotides”). In some embodiments, a locked nucleic acid is a nucleotide having a modified ribose moiety in which the ribose moiety comprises an extra bridge connecting, e.g., the 2′ and 4′ carbons. This structure effectively “locks” the ribose in the 3′-endo structural conformation. The addition of locked nucleic acids to siRNAs has been shown to increase siRNA stability in serum, increase thermal stability, and to reduce off-target effects (Elmen, J. et al., (2005) Nucleic Acids Research 33(1):439-447; Mook, OR. et al., (2007) Mol Canc Ther 6(3):833-843; Grunweller, A. et al., (2003) Nucleic Acids Research 31(12):3185-3193).

[0190] Examples of bicyclic nucleosides for use in the polynucleotides of the disclosure include without limitation nucleosides comprising a bridge between the 4′ and the 2′ ribosyl ring atoms. In certain embodiments, the antisense polynucleotide agents of the disclosure include one or more bicyclic nucleosides comprising a 4′ to 2′ bridge. Examples of such 4′ to 2′ bridged bicyclic nucleosides, include but are not limited to 4′—(CH2)—O—2′ (LNA); 4′—(CH2)—S—2′; 4′—(CH2)2—O—2′ (ENA); 4′—CH(CH3)—O—2′ (also referred to as “constrained ethyl” or “cEt”) and 4′—CH(CH2OCH3)—O—2′ (and analogs thereof; see, e.g., U.S. Pat. No. 7,399,845); 4′—C(CH3)(CH3)—O—2′ (and analogs thereof; see e.g., US Pat. No. 8,278,283); 4′—CH2— N(OCH3)—2′ (and analogs thereof; see e.g., US Pat. No. 8,278,425); 4′—CH2—O—N(CH3)—2′ (see, e.g., U.S. Pat. Publication No. 2004/0171570); 4′—CH2—N(R)—O—2′, wherein R is H, C1-C12 alkyl, or a protecting group (see, e.g., U.S. Pat. No. 7,427,672); 4′—CH2—C(H)(CH3)—2′ (see, e.g., Chattopadhyaya et al., J. Org. Chem., 2009, 74, 118-134); and 4′—CH2—C(═CH2)—2′ (and analogs thereof; see, e.g., US Pat. No. 8,278,426). The contents of each of the foregoing are incorporated herein by reference for the methods provided therein. Representative U.S. Pats. that teach the preparation of locked nucleic acids include, but are not limited to, the following: U.S. Pat. Nos. 6,268,490; 6,670,461; 6,794,499; 6,998,484; 7,053,207; 7,084,125; 7,399,845, and 8,314,227, each of which is herein incorporated by reference in its entirety. Exemplary LNAs include but are not limited to, a 2′, 4′-C methylene bicyclo nucleotide (see for example Wengel et al., International PCT 5 Publication No. WO 00/66604 and WO 99/14226).

[0191] Any of the foregoing bicyclic nucleosides can be prepared having one or more stereochemical sugar configurations including for example α-L-ribofuranose and (β-D-ribofuranose (see WO 99/14226).

[0192] A RNAi agent of the disclosure can also be modified to include one or more constrained ethyl nucleotides. As used herein, a “constrained ethyl nucleotide” or “cEt” is a locked nucleic acid comprising a bicyclic sugar moiety comprising a 4′—CH(CH3)—0-2′ bridge. In some embodiments, a constrained ethyl nucleotide is in the S conformation referred to herein as “S-cEt.”

[0193] A RNAi agent of the disclosure may also include one or more “conformationally restricted nucleotides” (“CRN”). CRN are nucleotide analogs with a linker connecting the C2′ and C4′ carbons of ribose or the C3′ and -C5' carbons of ribose. CRN lock the ribose ring into a stable conformation and increase the hybridization affinity to mRNA. The linker is of sufficient length to place the oxygen in an optimal position for stability and affinity resulting in less ribose ring puckering.

[0194] Representative publications that teach the preparation of certain of the above noted CRN include, but are not limited to, US 2013/0190383; and WO 2013/036868, the contents of each of which are hereby incorporated herein by reference for the methods provided therein.

[0195] In some embodiments, a RNAi agent of the disclosure comprises one or more monomers that are UNA (unlocked nucleic acid) nucleotides. UNA is unlocked acyclic nucleic acid, wherein any of the bonds of the sugar has been removed, forming an unlocked “sugar” residue. In one example, UNA also encompasses monomer with bonds between C1 ' -C4' have been removed (i.e. the covalent carbon-oxygen-carbon bond between the C1′ and C4′ carbons). In another example, the C2′-C3' bond (i.e. the covalent carbon-carbon bond between the C2′ and C3′ carbons) of the sugar has been removed (see Nuc. Acids Symp. Series, 52, 133-134 (2008) and Fluiter et al., Mol. Biosyst., 2009, 10, 1039).

[0196] Representative U.S. publications that teach the preparation of UNA include, but are not limited to, US 8,314,227; and U.S. Pat. Publication Nos. 2013/0096289; 2013/0011922; and 2011/0313020, the contents of each of which are hereby incorporated herein by reference for the methods provided therein.

[0197] In other embodiments, the iRNA agents include one or more (e.g., about 1, 2, 3, 4, 5, 6, 7, 8, 9, 10, or more) G-clamp nucleotides. A G-clamp nucleotide is a modified cytosine analog wherein the modifications confer the ability to hydrogen bond both Watson-Crick and Hoogsteen faces of a complementary guanine within a duplex, see for example Lin and Matteucci, 1998, J. Am. Chem. Soc., 120, 8531-8532. A single G-clamp analog substitution within an oligonucleotide can result in substantially enhanced helical thermal stability and mismatch discrimination when hybridized to complementary oligonucleotides. The inclusion of such nucleotides in the iRNA molecules can result in enhanced affinity and specificity to nucleic acid targets, complementary sequences, or template strands.

[0198] Potentially stabilizing modifications to the ends of RNA molecules can include N-(acetylaminocaproyl)-4-hydroxyprolinol (Hyp-C6-NHAc), N-(caproyl-4-hydroxyprolinol (Hyp-C6), N-(acetyl-4-hydroxyprolinol (Hyp-NHAc), thymidine-2′-O-deoxythymidine (ether), N-(aminocaproyl)-4-hydroxyprolinol (Hyp-C6-amino), 2-docosanoyl-uridine-3″ phosphate, inverted base dT(idT) and others. Disclosure of this modification can be found in PCT Publication No. WO 2011/005861.

[0199] Other modifications of a RNAi agent of the disclosure include a 5′ phosphate or 5′ phosphate mimic, e.g., a 5′-terminal phosphate or phosphate mimic on the antisense strand of a RNAi agent. Suitable phosphate mimics are disclosed in, for example US 2012/0157511, the contents of which are incorporated herein by reference for the methods provided therein.

### iRNA Motifs

[0200] In certain aspects of the disclosure, the double-stranded RNAi agents of the disclosure include agents with chemical modifications as disclosed, for example, in WO 2013/075035, the contents of which are incorporated herein by reference for the methods provided therein. As shown herein and in WO 2013/075035, a superior result may be obtained by introducing one or more motifs of three identical modifications on three consecutive nucleotides into a sense strand or antisense strand of an RNAi agent, particularly at or near the cleavage site. In some embodiments, the sense strand and antisense strand of the RNAi agent may otherwise be completely modified. The introduction of these motifs interrupts the modification pattern, if present, of the sense or antisense strand. The RNAi agent may be optionally conjugated with a lipophilic moiety or ligand, e.g., a C16 moiety or ligand, for instance on the sense strand. The RNAi agent may be optionally modified with a (S)-glycol nucleic acid (GNA) modification, for instance on one or more residues of the antisense strand. The resulting RNAi agents present superior gene silencing activity.

[0201] In some embodiments, the sense strand sequence may be represented by formula (I):

[chemical structure]

wherein:
[0202] i and j are each independently 0 or 1;
[0203] p and q are each independently 0-6;
[0204] each Na independently represents an oligonucleotide sequence comprising 0-25 modified nucleotides, each sequence comprising at least two differently modified nucleotides;
[0205] each N_{b} independently represents an oligonucleotide sequence comprising 0-10 modified nucleotides;
[0206] each np and nq independently represent an overhang nucleotide;
[0207] wherein Nb and Y do not have the same modification; and
[0208] XXX, YYY and ZZZ each independently represent one motif of three identical modifications on three consecutive nucleotides. In some embodiments, YYY is all 2′-F modified nucleotides.

[0209] In some embodiments, the Na and/or N_{b} comprise modifications of alternating pattern.

[0210] In some embodiments, the YYY motif occurs at or near the cleavage site of the sense strand. For example, when the RNAi agent has a duplex region of 17-23 nucleotides in length, the YYY motif can occur at or the vicinity of the cleavage site (e.g.: can occur at positions 6, 7, 8; 7, 8, 9; 8, 9, 10; 9, 10, 11; 10, 11, 12 or 11, 12, 13) of the sense strand, the count starting from the l^{st}nucleotide, from the 5′-end; or optionally, the count starting at the 1ₛₜ paired nucleotide within the duplex region, from the 5′-end.

[0211] In some embodiments, i is 1 and j is 0, or i is 0 and j is 1, or both i and j are 1. The sense strand can therefore be represented by the following formulas:

[chemical structure]

[chemical structure]

[chemical structure]

[0212] When the sense strand is represented by formula (Ib), N_{b} represents an oligonucleotide sequence comprising 0-10, 0-7, 0-5, 0-4, 0-2 or 0 modified nucleotides. Each Nₐ independently can represent an oligonucleotide sequence comprising 2-20, 2-15, or 2-10 modified nucleotides.

[0213] When the sense strand is represented as formula (Ic), N_{b} represents an oligonucleotide sequence comprising 0-10, 0-7, 0-5, 0-4, 0-2 or 0 modified nucleotides. Each Nₐ can independently represent an oligonucleotide sequence comprising 2-20, 2-15, or 2-10 modified nucleotides.

[0214] When the sense strand is represented as formula (Id), each N_{b} independently represents an oligonucleotide sequence comprising 0-10, 0-7, 0-5, 0-4, 0-2 or 0 modified nucleotides. In some embodiments, N_{b} is 0, 1, 2, 3, 4, 5 or 6. Each Nₐ can independently represent an oligonucleotide sequence comprising 2-20, 2-15, or 2-10 modified nucleotides.

[0215] Each of X, Y and Z may be the same or different from each other.

[0216] In other embodiments, i is 0 and j is 0, and the sense strand may be represented by the formula:

[chemical structure]

[0217] When the sense strand is represented by formula (Ia), each Nₐ independently can represent an oligonucleotide sequence comprising 2-20, 2-15, or 2-10 modified nucleotides.

[0218] In some embodiments, the antisense strand sequence of the RNAi may be represented by formula (II):

[chemical structure]

wherein:
[0219] k and 1 are each independently 0 or 1;
[0220] p′ and q′ are each independently 0-6;
[0221] each Nₐ' independently represents an oligonucleotide sequence comprising 0-25 modified nucleotides, each sequence comprising at least two differently modified nucleotides;
[0222] each N_{b}' independently represents an oligonucleotide sequence comprising 0-10 modified nucleotides;
[0223] each nₚ' and n_{q}' independently represent an overhang nucleotide;
[0224] wherein N_{b}' and Y′ do not have the same modification; and
[0225] X′X′X′, Y′Y′Y′, and Z′Z′Z′ each independently represent one of three identical modification on three consecutive nucleotides.

[0226] In some embodiments, the Nₐ' and/or N_{b}' comprise modification of alternating pattern.

[0227] The Y′Y′Y′ motif occurs at or near the cleavage site of the antisense strand. For example, when the RNAi agent has a duplex region of 17-23 nucleotides in length, the Y′Y′Y′ motif can occur at positions 9, 10, 11; 10, 11, 12; 11, 12, 13; 12, 13, 14 ; or 13, 14, 15 of the antisense strand, with the count starting from the 1 ^{st} nucleotide, from the 5′-end; or optionally, the count starting at the 1^{st} paired nucleotide within the duplex region, from the 5′- end. In some embodiments, the Y′Y′Y′ motif occurs at positions 11, 12, 13.

[0228] In some embodiments, Y′Y′Y′ motif is all 2′-Ome modified nucleotides.

[0229] In on embodiment, k is 1 and 1 is 0, or k is 0 and 1 is 1, or both 5 k and 1 are 1.

[0230] The antisense strand can therefore be represented by the following formulas:

[chemical structure]

[chemical structure]

[chemical structure]

[0231] When the antisense strand is represented by formula (IIb), N_{b}' represents an oligonucleotide sequence comprising 0-10, 0-7, 0-5, 0-4, 0-2 or 0 modified nucleotides. Each Nₐ' independently represents an oligonucleotide sequence comprising 2-20, 2-15, or 2-10 modified nucleotides.

[0232] When the antisense strand is represented as formula (IId), each N_{b}' independently represents an oligonucleotide sequence comprising 0-10, 0-7, 0-5, 0-4, 0-2 or 0 modified nucleotides. Each Nₐ' independently represents an oligonucleotide sequence comprising 2-20, 2-15, or 2-10 modified nucleotides. In some embodiments, N_{b}is 0, 1, 2, 3, 4, 5 or 6.

[0233] In other embodiments, k is 0 and 1 is 0 and the antisense strand may be represented by the formula:

[chemical structure]

[0234] When the antisense strand is represented as formula (IIa), each Nₐ' independently represents an oligonucleotide sequence comprising 2-20, 2-15, or 2-10 modified nucleotides.

[0235] Each of X′, Y′ and Z′ may be the same or different from each other.

[0236] Each nucleotide of the sense strand and antisense strand may be independently modified with LNA, HNA, CeNA, GNA, 2′-methoxyethyl, 2′-O-methyl, 2′-O-allyl, 2′-C- allyl, 2′-hydroxyl, or 2′-fluoro. For example, each nucleotide of the sense strand and antisense strand is independently modified with 2′-O-methyl or 2′-fluoro. Each X, Y, Z, X′, Y′ and Z′, in particular, may represent a 2′-O-methyl modification or a 2′-fluoro modification.

[0237] In some embodiments, the sense strand of the RNAi agent may contain YYY motif occurring at 9, 10 and 11 positions of the strand when the duplex region is 21 nt, the count starting from the 1^{st} nucleotide from the 5′-end, or optionally, the count starting at the 1^{st} paired nucleotide within the duplex region, from the 5′- end; and Y represents 2′-F modification. The sense strand may additionally contain XXX motif or ZZZ motifs as wing modifications at the opposite end of the duplex region; and XXX and ZZZ each independently represents a 2′-OMe modification or 2′-F modification.

[0238] In some embodiments the antisense strand may Y′Y′Y′ motif occurring at positions 11, 12, 13 of the strand, the count starting from the 1^{st} nucleotide from the 5′-end, or optionally, the count starting at the 1^{st} paired nucleotide within the duplex region, from the 5′- end; and Y′ represents 2′-O-methyl modification. The antisense strand may additionally contain X′X′X′ motif or Z′Z′Z′ motifs as wing modifications at the opposite end of the duplex region; and X′X′X′ and Z′Z′Z′ each independently represents a 2′-OMe modification or 2′-F modification.

[0239] The sense strand represented by any one of the above formulas (Ia), (Ib), (Ic), and (Id) forms a duplex with an antisense strand being represented by any one of formulas (IIa), (IIb), (IIc), and (IId), respectively.

[0240] Accordingly, certain RNAi agents for use in the methods of the disclosure may comprise a sense strand and an antisense strand, each strand having 14 to 30 nucleotides, the RNAi duplex represented by formula (III): sense:

[chemical structure]

antisense:

[chemical structure]

wherein,
[0241] i, j, k, and 1 are each independently 0 or 1;
[0242] p, p′, q, and q′ are each independently 0-6;
[0243] each Nₐ and Nₐ’ independently represents an oligonucleotide sequence comprising 0-25 modified nucleotides, each sequence comprising at least two differently modified nucleotides;
[0244] each N_{b} and N_{b}' independently represents an oligonucleotide sequence comprising 0-10 modified nucleotides; wherein
[0245] each nₚ', nₚ, n_{q}', and n_{q}, each of which may or may not be present independently represents an overhang nucleotide; and
[0246] XXX, YYY, ZZZ, X′X′X′, Y′Y′Y′, and Z′Z′Z′ each independently represent one motif of three identical modification on three consecutive nucleotides.

[0247] In some embodiments, i is 0 and j is 0; or i is 1 and j is 0; or i is 0 and j is 1; or both i and j are 0; or both i and j are 1. In some embodiments, k is 0 and 1 is 0; or k is 1 and 1 is 0; k is 0 and 1 is 1; or both k and 1 are 0; or both k and 1 are 1.

[0248] Exemplary combinations of the sense strand and antisense strand forming a RNAi duplex include the formulas below:

[chemical structure]

[chemical structure]

[chemical structure]

[chemical structure]

[0249] When the RNAi agent is represented by formula (IIIa), each Nₐ independently represents an oligonucleotide sequence comprising 2-20, 2-15, or 2-10 modified nucleotides.

[0250] When the RNAi agent is represented by formula (IIIb), each N_{b} independently represents an oligonucleotide sequence comprising 1-10, 1-7, 1-5 or 1-4 modified nucleotides. Each Nₐ independently represents an oligonucleotide sequence comprising 2-20, 2-15, or 2-10 modified nucleotides.

[0251] When the RNAi agent is represented as formula (IIIc), each N_{b}, N_{b}' independently represents an oligonucleotide sequence comprising 0-10, 0-7, 0-5, 0-4, 0-2 or 0 modified nucleotides. Each Nₐ independently represents an oligonucleotide sequence comprising 2-20, 2-15, or 2-10 modified nucleotides.

[0252] When the RNAi agent is represented as formula (IIId), each N_{b}, N_{b}' independently represents an oligonucleotide sequence comprising 0-10, 0-7, 0-5, 0-4, 0-2 or 0 modified nucleotides. Each Nₐ, Nₐ' independently represents an oligonucleotide sequence comprising 2-20, 2-15, or 2-10 modified nucleotides. Each of Nₐ, Nₐ', N_{b} and N_{b}' independently comprises modifications of alternating pattern.

[0253] Each of X, Y and Z in formulas (III), (IIIa), (IIIb), (IIIc), and (IIId) may be the same or different from each other.

[0254] When the RNAi agent is represented by formula (III), (IIIa), (IIIb), (IIIc), and (IIId), at least one of the Y nucleotides may form a base pair with one of the Y′ nucleotides. Alternatively, at least two of the Y nucleotides form base pairs with the corresponding Y′ nucleotides; or all three of the Y nucleotides all form base pairs with the corresponding Y′ nucleotides.

[0255] When the RNAi agent is represented by formula (IIIb) or (IIId), at least one of the Z nucleotides may form a base pair with one of the Z′ nucleotides. Alternatively, at least two of the Z nucleotides form base pairs with the corresponding Z′ nucleotides; or all three of the Z nucleotides all form base pairs with the corresponding Z′ nucleotides.

[0256] When the RNAi agent is represented as formula (IIIc) or (IIId), at least one of the X nucleotides may form a base pair with one of the X′ nucleotides. Alternatively, at least two of the X nucleotides form base pairs with the corresponding X′ nucleotides; or all three of the X nucleotides all form base pairs with the corresponding X′ nucleotides.

[0257] In some embodiments, the modification on the Y nucleotide is different than the modification on the Y′ nucleotide, the modification on the Z nucleotide is different than the modification on the Z′ nucleotide, and/or the modification on the X nucleotide is different than the modification on the X′ nucleotide.

[0258] In some embodiments, when the RNAi agent is represented by formula (IIId), the Na modifications are 2′-O-methyl or 2′-fluoro modifications. In some embodiments, when the RNAi agent is represented by formula (IIId), the Na modifications are 2′-O-methyl or 2′-fluoro modifications and np′ >0 and at least one np′ is linked to a neighboring nucleotide a via phosphorothioate linkage. In some embodiments, when the RNAi agent is represented by formula (IIId), the Nₐ modifications are 2′-O-methyl or 2′-fluoro modifications, np′ >0 and at least one np′ is linked to a neighboring nucleotide via phosphorothioate linkage, and the sense strand is conjugated to one or more moieties or ligands (e.g., one or more lipophilic moieties, optionally one or more C16 moieties, or one or more GalNAc moieties) attached through a bivalent or trivalent branched linker. In some embodiments, when the RNAi agent is represented by formula (IIId), the Na modifications are 2′-O-methyl or 2′-fluoro modifications, np′ >0 and at least one np′ is linked to a neighboring nucleotide via phosphorothioate linkage, the sense strand comprises at least one phosphorothioate linkage, and the sense strand is conjugated to one or more moieties or ligands (e.g., one or more lipophilic moieties, optionally one or more C16 moieties, or one or more GalNAc moieties) attached through a bivalent or trivalent branched linker.

[0259] In some embodiments, when the RNAi agent is represented by formula (IIIa), the Na modifications are 2′-O-methyl or 2′-fluoro modifications, np′ >0 and at least one np′ is linked to a neighboring nucleotide via phosphorothioate linkage, the sense strand comprises at least one phosphorothioate linkage, and the sense strand is conjugated to one or more moieties or ligands (e.g., one or more lipophilic moieties, optionally one or more C16 moieties, or one or more GalNAc moieties) attached through a bivalent or trivalent branched linker.

[0260] In some embodiments, the RNAi agent is a multimer containing at least two duplexes represented by formula (III), (IIIa), (IIIb), (IIIc), and (IIId), wherein the duplexes are connected by a linker. The linker can be cleavable or non-cleavable. Optionally, the multimer further comprises a ligand. Each of the duplexes can target the same gene or two different genes; or each of the duplexes can target same gene at two different target sites.

[0261] In some embodiments, the RNAi agent is a multimer containing three, four, five, six or more duplexes represented by formula (III), (IIIa), (IIIb), (IIIc), and (IIId), wherein the duplexes are connected by a linker. The linker can be cleavable or non-cleavable. Optionally, the multimer further comprises a ligand. Each of the duplexes can target the same gene or two different genes; or each of the duplexes can target same gene at two different target sites.

[0262] In some embodiments, two RNAi agents represented by formula (III), (IIIa), (IIIb), (IIIc), and (IIId) are linked to each other at the 5′ end, and one or both of the 3′ ends and are optionally conjugated to a ligand. Each of the agents can target the same gene or two different genes; or each of the agents can target same gene at two different target sites.

[0263] Various publications describe multimeric RNAi agents that can be used in the methods of the disclosure. Such publications include WO2007/091269, WO2010/141511, WO2007/117686, WO2009/014887, and WO2011/031520; and US 7858769, the contents of each of which are hereby incorporated herein by reference for the methods provided therein. In certain embodiments, the RNAi agents of the disclosure may include GalNAc ligands.

[0264] As described in more detail below, the RNAi agent that contains conjugations of one or more carbohydrate moieties to a RNAi agent can optimize one or more properties of the RNAi agent. In many cases, the carbohydrate moiety will be attached to a modified subunit of the RNAi agent. For example, the ribose sugar of one or more ribonucleotide subunits of a dsRNA agent can be replaced with another moiety, e.g., a non-carbohydrate (preferably cyclic) carrier to which is attached a carbohydrate ligand. A ribonucleotide subunit in which the ribose sugar of the subunit has been so replaced is referred to herein as a ribose replacement modification subunit (RRMS). A cyclic carrier may be a carbocyclic ring system, i.e., all ring atoms are carbon atoms, or a heterocyclic ring system, i.e., one or more ring atoms may be a heteroatom, e.g., nitrogen, oxygen, sulfur. The cyclic carrier may be a monocyclic ring system, or may contain two or more rings, e.g. fused rings. The cyclic carrier may be a fully saturated ring system, or it may contain one or more double bonds.

[0265] The ligand may be attached to the polynucleotide via a carrier. The carriers include (i) at least one “backbone attachment point,” preferably two “backbone attachment points” and (ii) at least one “tethering attachment point.” A “backbone attachment point” as used herein refers to a functional group, e.g. a hydroxyl group, or generally, a bond available for, and that is suitable for incorporation of the carrier into the backbone, e.g., the phosphate, or modified phosphate, e.g., sulfur containing, backbone, of a ribonucleic acid. A “tethering attachment point” (TAP) in some embodiments refers to a constituent ring atom of the cyclic carrier, e.g., a carbon atom or a heteroatom (distinct from an atom which provides a backbone attachment point), that connects a selected moiety. The moiety can be, e.g., a carbohydrate, e.g. monosaccharide, disaccharide, trisaccharide, tetrasaccharide, oligosaccharide, and polysaccharide. Optionally, the selected moiety is connected by an intervening tether to the cyclic carrier. Thus, the cyclic carrier will often include a functional group, e.g., an amino group, or generally, provide a bond, that is suitable for incorporation or tethering of another chemical entity, e.g., a ligand to the constituent ring.

[0266] The RNAi agents may be conjugated to a ligand via a carrier, wherein the carrier can be cyclic group or acyclic group; preferably, the cyclic group is selected from pyrrolidinyl, pyrazolinyl, pyrazolidinyl, imidazolinyl, imidazolidinyl, piperidinyl, piperazinyl, [1,3]dioxolane, oxazolidinyl, isoxazolidinyl, morpholinyl, thiazolidinyl, isothiazolidinyl, quinoxalinyl, pyridazinonyl, tetrahydrofuryl and and decalin; preferably, the acyclic group is selected from serinol backbone or diethanolamine backbone.

[0267] In certain specific embodiments, the RNAi agent for use in the methods of the disclosure is an agent selected from the group of agents listed in any one of Tables 2A, 2B, 3A, 3B, 4A, 4B, 5A, and 4B. These agents may further comprise a ligand. The ligand can be attached to the sense strand, antisense strand or both strands, at the 3′-end, 5′-end, or both ends. For instance, the ligand may be conjugated to the sense strand, in particular, the 3′-end of the sense strand.

### iRNA Conjugates

[0268] The iRNA agents disclosed herein can be in the form of conjugates. The conjugate may be attached at any suitable location in the iRNA molecule, e.g., at the 3′ end or the 5′ end of the sense or the antisense strand. The conjugates are optionally attached via a linker.

[0269] In some embodiments, an iRNA agent described herein is chemically linked to one or more ligands, moieties or conjugates, which may confer functionality, e.g., by affecting (e.g., enhancing) the activity, cellular distribution or cellular uptake of the iRNA. Such moieties include but are not limited to lipid moieties such as a cholesterol moiety (Letsinger et al., Proc. Natl. Acid. Sci. USA, 1989, 86: 6553-6556), cholic acid (Manoharan et al., Biorg. Med. Chem. Let., 1994, 4:1053-1060), a thioether, e.g., beryl-S-tritylthiol (Manoharan et al., Ann. N.Y. Acad. Sci., 1992, 660:306-309; Manoharan et al., Biorg. Med. Chem. Let., 1993, 3:2765-2770), a thiocholesterol (Oberhauser et al., Nucl. Acids Res., 1992, 20:533-538), an aliphatic chain, e.g., dodecandiol or undecyl residues (Saison-Behmoaras et al., EMBO J, 1991, 10:1111-1118; Kabanov et al., FEBS Lett., 1990, 259:327-330; Svinarchuk et al., Biochimie, 1993, 75:49-54), a phospholipid, e.g., di-hexadecyl-rac-glycerol or triethyl-ammonium 1,2-di-O-hexadecyl-rac-glycero-3-phosphonate (Manoharan et al., Tetrahedron Lett., 1995, 36:3651-3654; Shea et al., Nucl. Acids Res., 1990, 18:3777-3783), a polyamine or a polyethylene glycol chain (Manoharan et al., Nucleosides & Nucleotides, 1995, 14:969-973), or adamantane acetic acid (Manoharan et al., Tetrahedron Lett., 1995, 36:3651-3654), a palmityl moiety (Mishra et al., Biochim. Biophys. Acta, 1995, 1264:229-237), or an octadecylamine or hexylamino-carbonyloxycholesterol moiety (Crooke et al., J. Pharmacol. Exp. Ther., 1996, 277:923-937).

[0270] In some embodiments, a ligand alters the distribution, targeting or lifetime of an iRNA agent into which it is incorporated. In some embodiments, a ligand provides an enhanced affinity for a selected target, e.g., molecule, cell or cell type, compartment, e.g., a cellular or organ compartment, tissue, organ or region of the body, as, e.g., compared to a species absent such a ligand. Typical ligands will not take part in duplex pairing in a duplexed nucleic acid.

[0271] Ligands can include a naturally occurring substance, such as a protein (e.g., human serum albumin (HSA), low-density lipoprotein (LDL), or globulin); carbohydrate (e.g., a dextran, pullulan, chitin, chitosan, inulin, cyclodextrin or hyaluronic acid); or a lipid. The ligand may also be a recombinant or synthetic molecule, such as a synthetic polymer, e.g., a synthetic polyamino acid. Examples of polyamino acids include polyamino acid is a polylysine (PLL), poly L-aspartic acid, poly L-glutamic acid, styrene-maleic acid anhydride copolymer, poly(L-lactide-co-glycolied) copolymer, divinyl ether-maleic anhydride copolymer, N-(2-hydroxypropyl)methacrylamide copolymer (HMPA), polyethylene glycol (PEG), polyvinyl alcohol (PVA), polyurethane, poly(2-ethylacryllic acid), N-isopropylacrylamide polymers, or polyphosphazine. Examples of polyamines include: polyethylenimine, polylysine (PLL), spermine, spermidine, polyamine, pseudopeptide-polyamine, peptidomimetic polyamine, dendrimer polyamine, arginine, amidine, protamine, cationic lipid, cationic porphyrin, quaternary salt of a polyamine, or an a helical peptide.

[0272] Ligands can also include targeting groups, e.g., a cell or tissue targeting agent, e.g., a lectin, glycoprotein, lipid or protein, e.g., an antibody, that binds to a specified cell type such as a kidney cell. A targeting group can be a thyrotropin, melanotropin, lectin, glycoprotein, surfactant protein A, Mucin carbohydrate, multivalent lactose, multivalent galactose, N-acetyl-galactosamine, N-acetyl-gulucosamine multivalent mannose, multivalent fucose, glycosylated polyaminoacids, multivalent galactose, transferrin, bisphosphonate, polyglutamate, polyaspartate, a lipid, cholesterol, a steroid, bile acid, folate, vitamin B12, biotin, or an RGD peptide or RGD peptide mimetic.

[0273] Other examples of ligands include dyes, intercalating agents (e.g. acridines), cross-linkers (e.g. psoralene, mitomycin C), porphyrins (TPPC4, texaphyrin, Sapphyrin), polycyclic aromatic hydrocarbons (e.g., phenazine, dihydrophenazine), artificial endonucleases (e.g. EDTA), lipophilic molecules, e.g, cholesterol, cholic acid, adamantane acetic acid, 1-pyrene butyric acid, dihydrotestosterone, 1,3-Bis-O(hexadecyl)glycerol, geranyloxyhexyl group, hexadecylglycerol, borneol, menthol, 1,3-propanediol, heptadecyl group, palmitic acid, myristic acid,O3-(oleoyl)lithocholic acid, O3-(oleoyl)cholenic acid, dimethoxytrityl, or phenoxazine)and peptide conjugates (e.g., antennapedia peptide, Tat peptide), alkylating agents, phosphate, amino, mercapto, PEG (e.g., PEG-40K), MPEG, [MPEG]2, polyamino, alkyl, substituted alkyl, radiolabeled markers, enzymes, haptens (e.g. biotin), transport/absorption facilitators (e.g., aspirin, vitamin E, folic acid), synthetic ribonucleases (e.g., imidazole, bisimidazole, histamine, imidazole clusters, acridine-imidazole conjugates, Eu3+ complexes of tetraazamacrocycles), dinitrophenyl, HRP, or AP.

[0274] Ligands can be proteins, e.g., glycoproteins, or peptides, e.g., molecules having a specific affinity for a co-ligand, or antibodies e.g., an antibody, that binds to a specified cell type such as an ocular cell. Ligands may also include hormones and hormone receptors. They can also include non-peptidic species, such as lipids, lectins, carbohydrates, vitamins, cofactors, multivalent lactose, multivalent galactose, N-acetyl-galactosamine, N-acetyl-glucosamine multivalent mannose, or multivalent fucose. The ligand can be, for example, a lipopolysaccharide, an activator of p38 MAP kinase, or an activator of NF-xB.

[0275] The ligand can be a substance, e.g., a drug, which can increase the uptake of the iRNA agent into the cell, for example, by disrupting the cell’s cytoskeleton, e.g., by disrupting the cell’s microtubules, microfilaments, and/or intermediate filaments. The drug can be, for example, taxon, vincristine, vinblastine, cytochalasin, nocodazole, japlakinolide, latrunculin A, phalloidin, swinholide A, indanocine, or myoservin.

[0276] In some embodiments, a ligand attached to an iRNA as described herein acts as a pharmacokinetic modulator (PK modulator). PK modulators include lipophiles, bile acids, steroids, phospholipid analogues, peptides, protein binding agents, PEG, vitamins etc. Exemplary PK modulators include, but are not limited to, cholesterol, fatty acids, cholic acid, lithocholic acid, dialkylglycerides, diacylglyceride, phospholipids, sphingolipids, naproxen, ibuprofen, vitamin E, biotin etc. Oligonucleotides that comprise a number of phosphorothioate linkages are also known to bind to serum protein, thus short oligonucleotides, e.g., oligonucleotides of about 5 bases, 10 bases, 15 bases or 20 bases, comprising multiple of phosphorothioate linkages in the backbone are also amenable to the present disclosure as ligands (e.g. as PK modulating ligands). In addition, aptamers that bind serum components (e.g. serum proteins) are also suitable for use as PK modulating ligands in the embodiments described herein.

[0277] Ligand-conjugated oligonucleotides of the disclosure may be synthesized by the use of an oligonucleotide that bears a pendant reactive functionality, such as that derived from the attachment of a linking molecule onto the oligonucleotide (described below). This reactive oligonucleotide may be reacted directly with commercially available ligands, ligands that are synthesized bearing any of a variety of protecting groups, or ligands that have a linking moiety attached thereto.

[0278] The oligonucleotides used in the conjugates of the present disclosure may be conveniently and routinely made through the well-known technique of solid-phase synthesis. Equipment for such synthesis is sold by several vendors including, for example, Applied Biosystems (Foster City, Calif.). Any other means for such synthesis known in the art may additionally or alternatively be employed. It is also known to use similar techniques to prepare other oligonucleotides, such as the phosphorothioates and alkylated derivatives.

[0279] In the ligand-conjugated oligonucleotides and ligand-molecule bearing sequence-specific linked nucleosides of the present disclosure, the oligonucleotides and oligonucleosides may be assembled on a suitable DNA synthesizer utilizing standard nucleotide or nucleoside precursors, or nucleotide or nucleoside conjugate precursors that already bear the linking moiety, ligand-nucleotide or nucleoside-conjugate precursors that already bear the ligand molecule, or non-nucleoside ligand-bearing building blocks.

[0280] When using nucleotide-conjugate precursors that already bear a linking moiety, the synthesis of the sequence-specific linked nucleosides is typically completed, and the ligand molecule is then reacted with the linking moiety to form the ligand-conjugated oligonucleotide. In some embodiments, the oligonucleotides or linked nucleosides of the present disclosure are synthesized by an automated synthesizer using phosphoramidites derived from ligand-nucleoside conjugates in addition to the standard phosphoramidites and non-standard phosphoramidites that are commercially available and routinely used in oligonucleotide synthesis.

### A. Lipophilic Moieties

[0281] In certain embodiments, the lipophilic moiety is an aliphatic, cyclic such as alicyclic, or polycyclic such as polyalicyclic compound, such as a steroid (e.g., sterol) or a linear or branched aliphatic hydrocarbon. The lipophilic moiety may generally comprise a hydrocarbon chain, which may be cyclic or acyclic. The hydrocarbon chain may comprise various substituents or one or more heteroatoms, such as an oxygen or nitrogen atom. Such lipophilic aliphatic moieties include, without limitation, saturated or unsaturated C₄-C₃₀ hydrocarbon (e.g., C₆-C₁₈ hydrocarbon), saturated or unsaturated fatty acids, waxes (e.g., monohydric alcohol esters of fatty acids and fatty diamides), terpenes (e.g., C₁₀ terpenes, C₁₅ sesquiterpenes, C₂₀ diterpenes, C₃₀ triterpenes, and C₄₀ tetraterpenes), and other polyalicyclic hydrocarbons. For instance, the lipophilic moiety may contain a C₄-C₃₀ hydrocarbon chain (e.g., C₄-C₃₀ alkyl or alkenyl). In some embodiments the lipophilic moiety contains a saturated or unsaturated C₆-C₁₈ hydrocarbon chain (e.g., a linear C₆-C₁₈ alkyl or alkenyl). In some embodiments, the lipophilic moiety contains a saturated or unsaturated C16 hydrocarbon chain (e.g., a linear C16 alkyl or alkenyl).

[0282] The lipophilic moiety may be attached to the RNAi agent by any method known in the art, including via a functional grouping already present in the lipophilic moiety or introduced into the RNAi agent, such as a hydroxy group (e.g., —CO—CH₂—OH). The functional groups already present in the lipophilic moiety or introduced into the RNAi agent include, but are not limited to, hydroxyl, amine, carboxylic acid, sulfonate, phosphate, thiol, azide, and alkyne.

[0283] Conjugation of the RNAi agent and the lipophilic moiety may occur, for example, through formation of an ether or a carboxylic or carbamoyl ester linkage between the hydroxy and an alkyl group R—, an alkanoyl group RCO— or a substituted carbamoyl group RNHCO— The alkyl group R may be cyclic (e.g., cyclohexyl) or acyclic (e.g., straight-chained or branched; and saturated or unsaturated). Alkyl group R may be a butyl, pentyl, hexyl, heptyl, octyl, nonyl, decyl, undecyl, dodecyl, tridecyl, tetradecyl, pentadecyl, hexadecyl, heptadecyl or octadecyl group, or the like.

[0284] In some embodiments, the lipophilic moiety is conjugated to the double-stranded RNAi agent via a linker a linker containing an ether, thioether, urea, carbonate, amine, amide, maleimide-thioether, disulfide, phosphodiester, sulfonamide linkage, a product of a click reaction (e.g., a triazole from the azide-alkyne cycloaddition), or carbamate.

[0285] In another embodiment, the lipophilic moiety is a steroid, such as sterol. Steroids are polycyclic compounds containing a perhydro-1,2-cyclopentanophenanthrene ring system. Steroids include, without limitation, bile acids (e.g., cholic acid, deoxycholic acid and dehydrocholic acid), cortisone, digoxigenin, testosterone, cholesterol, and cationic steroids, such as cortisone. A “cholesterol derivative” refers to a compound derived from cholesterol, for example by substitution, addition or removal of substituents.

[0286] In another embodiment, the lipophilic moiety is an aromatic moiety. In this context, the term “aromatic” refers broadly to mono- and polyaromatic hydrocarbons. Aromatic groups include, without limitation, C₆-C₁₄ aryl moieties comprising one to three aromatic rings, which may be optionally substituted; “aralkyl” or “arylalkyl” groups comprising an aryl group covalently linked to an alkyl group, either of which may independently be optionally substituted or unsubstituted; and “heteroaryl” groups. As used herein, the term “heteroaryl” refers to groups having 5 to 14 ring atoms, preferably 5, 6, 9, or 10 ring atoms; having 6, 10, or 14_{π} electrons shared in a cyclic array, and having, in addition to carbon atoms, one to about three heteroatoms selected from the group consisting of nitrogen (N), oxygen (O), and sulfur (S).

[0287] As employed herein, a “substituted” alkyl, cycloalkyl, aryl, heteroaryl, or heterocyclic group is one having one to about four, preferably one to about three, more preferably one or two, non-hydrogen substituents. Suitable substituents include, without limitation, halo, hydroxy, nitro, haloalkyl, alkyl, alkaryl, aryl, aralkyl, alkoxy, aryloxy, amino, acylamino, alkylcarbamoyl, arylcarbamoyl, aminoalkyl, alkoxycarbonyl, carboxy, hydroxyalkyl, alkanesulfonyl, arenesulfonyl, alkanesulfonamido, arenesulfonamido, aralkylsulfonamido, alkylcarbonyl, acyloxy, cyano, and ureido groups.

[0288] In some embodiments, the lipophilic moiety is an aralkyl group, e.g., a 2-arylpropanoyl moiety. The structural features of the aralkyl group are selected so that the lipophilic moiety will bind to at least one protein in vivo. In certain embodiments, the structural features of the aralkyl group are selected so that the lipophilic moiety binds to serum, vascular, or cellular proteins. In certain embodiments, the structural features of the aralkyl group promote binding to albumin, an immunoglobulin, a lipoprotein, α-2-macroglubulin, or α-1-glycoprotein.

[0289] In certain embodiments, the ligand is naproxen or a structural derivative of naproxen. Procedures for the synthesis of naproxen can be found in U.S. Pat. No. 3,904,682 and U.S. Pat. No. 4,009,197, which are hereby incorporated by reference in their entirety. Naproxen has the chemical name (S)-6-Methoxy-a-methyl-2-naphthaleneacetic acid and the structure is

[chemical structure]

[0290] In certain embodiments, the ligand is ibuprofen or a structural derivative of ibuprofen. Procedures for the synthesis of ibuprofen can be found in US 3,228,831, which is incorporated herein by reference for the methods provided therein. The structure of ibuprofen is

[chemical structure]

[0291] Additional exemplary aralkyl groups are illustrated in US 7,626,014, which is incorporated herein by reference for the methods provided therein.

[0292] In another embodiment, suitable lipophilic moieties include lipid, cholesterol, retinoic acid, cholic acid, adamantane acetic acid, 1-pyrene butyric acid, dihydrotestosterone, 1,3-bis-O(hexadecyl)glycerol, geranyloxyhexyanol, hexadecylglycerol, borneol, menthol, 1,3-propanediol, heptadecyl group, palmitic acid, myristic acid, O3-(oleoyl)lithocholic acid, O3-(oleoyl)cholenic acid, ibuprofen, naproxen, dimethoxytrityl, or phenoxazine.

[0293] In certain embodiments, more than one lipophilic moiety can be incorporated into the double-strand RNAi agent, particularly when the lipophilic moiety has a low lipophilicity or hydrophobicity. In some embodiments, two or more lipophilic moieties are incorporated into the same strand of the double-strand RNAi agent. In some embodiments, each strand of the double-strand RNAi agent has one or more lipophilic moieties incorporated. In some embodiments, two or more lipophilic moieties are incorporated into the same position (i.e., the same nucleobase, same sugar moiety, or same internucleosidic linkage) of the double-strand RNAi agent. This can be achieved by, e.g., conjugating the two or more lipophilic moieties via a carrier, or conjugating the two or more lipophilic moieties via a branched linker, or conjugating the two or more lipophilic moieties via one or more linkers, with one or more linkers linking the lipophilic moieties consecutively.

[0294] The lipophilic moiety may be conjugated to the RNAi agent via a direct attachment to the ribosugar of the RNAi agent. Alternatively, the lipophilic moiety may be conjugated to the double-strand RNAi agent via a linker or a carrier.

[0295] In certain embodiments, the lipophilic moiety may be conjugated to the RNAi agent via one or more linkers (tethers).

[0296] In some embodiments, the lipophilic moiety is conjugated to the double-stranded RNAi agent via a linker containing an ether, thioether, urea, carbonate, amine, amide, maleimide-thioether, disulfide, phosphodiester, sulfonamide linkage, a product of a click reaction (e.g., a triazole from the azide-alkyne cycloaddition), or carbamate.

### B. Lipid Conjugates

[0297] In some embodiments, the ligand is a lipid or lipid-based molecule. Such a lipid or lipid-based molecule can typically bind a serum protein, such as human serum albumin (HSA). An HSA binding ligand allows for vascular distribution of the conjugate to a target tissue. For example, the target tissue can be the eye. Other molecules that can bind HSA can also be used as ligands. For example, neproxin or aspirin can be used. A lipid or lipid-based ligand can (a) increase resistance to degradation of the conjugate, (b) increase targeting or transport into a target cell or cell membrane, and/or (c) can be used to adjust binding to a serum protein, e.g., HSA.

[0298] A lipid-based ligand can be used to modulate, e.g., control (e.g., inhibit) the binding of the conjugate to a target tissue. For example, a lipid or lipid-based ligand that binds to HSA more strongly will be less likely to be targeted to the kidney and therefore less likely to be cleared from the body. A lipid or lipid-based ligand that binds to HSA less strongly can be used to target the conjugate to the kidney.

[0299] In some embodiments, the lipid-based ligand binds HSA. For example, the ligand can bind HSA with a sufficient affinity such that distribution of the conjugate to a non-kidney tissue is enhanced. However, the affinity is typically not so strong that the HSA-ligand binding cannot be reversed.

[0300] In some embodiments, the lipid-based ligand binds HSA weakly or not at all, such that distribution of the conjugate to the kidney is enhanced. Other moieties that target to kidney cells can also be used in place of or in addition to the lipid-based ligand.

[0301] In another aspect, the ligand is a moiety, e.g., a vitamin, which is taken up by a target cell, e.g., a proliferating cell. These are particularly useful for treating disorders characterized by unwanted cell proliferation, e.g., of the malignant or non-malignant type, e.g., cancer cells. Exemplary vitamins include vitamin A, E, and K. Other exemplary vitamins include are B vitamin, e.g., folic acid, B 12, riboflavin, biotin, pyridoxal or other vitamins or nutrients taken up by cancer cells. Also included are HSA and low-density lipoprotein (LDL).

### Cell Permeation Agents

[0302] In another aspect, the ligand is a cell-permeation agent, such as a helical cell-permeation agent. In some embodiments, the agent is amphipathic. An exemplary agent is a peptide such as tat or antennopedia. If the agent is a peptide, it can be modified, including a peptidylmimetic, invertomers, non-peptide or pseudo-peptide linkages, and use of D-amino acids. The helical agent is typically an α-helical agent, and can have a lipophilic and a lipophobic phase.

[0303] The ligand can be a peptide or peptidomimetic. A peptidomimetic (also referred to herein as an oligopeptidomimetic) is a molecule capable of folding into a defined three-dimensional structure similar to a natural peptide. The attachment of peptide and peptidomimetics to iRNA agents can affect pharmacokinetic distribution of the iRNA, such as by enhancing cellular recognition and absorption. The peptide or peptidomimetic moiety can be about 5-50 amino acids long, e.g., about 5, 10, 15, 20, 25, 30, 35, 40, 45, or 50 amino acids long.

[0304] A peptide or peptidomimetic can be, for example, a cell permeation peptide, cationic peptide, amphipathic peptide, or hydrophobic peptide (e.g., consisting primarily of Tyr, Trp or Phe). The peptide moiety can be a dendrimer peptide, constrained peptide or crosslinked peptide. In another alternative, the peptide moiety can include a hydrophobic membrane translocation sequence (MTS). An exemplary hydrophobic MTS-containing peptide is RFGF having the amino acid sequence AAVALLPAVLLALLAP (SEQ ID NO: 3438). An RFGF analogue (e.g., amino acid sequence AALLPVLLAAP (SEQ ID NO: 3439)) containing a hydrophobic MTS can also be a targeting moiety. The peptide moiety can be a “delivery” peptide, which can carry large polar molecules including peptides, oligonucleotides, and protein across cell membranes. For example, sequences from the HIV Tat protein (GRKKRRQRRRPPQ (SEQ ID NO: 3440)) and the Drosophila Antennapedia protein (RQIKIWFQNRRMKWKK (SEQ ID NO: 3441)) have been found to be capable of functioning as delivery peptides. A peptide or peptidomimetic can be encoded by a random sequence of DNA, such as a peptide identified from a phage-display library, or one-bead-one-compound (OBOC) combinatorial library (Lam et al., Nature, 354:82-84, 1991). Typically, the peptide or peptidomimetic tethered to a dsRNA agent via an incorporated monomer unit is a cell targeting peptide such as an arginine-glycine-aspartic acid (RGD)-peptide, or RGD mimic. A peptide moiety can range in length from about 5 amino acids to about 40 amino acids. The peptide moieties can have a structural modification, such as to increase stability or direct conformational properties. Any of the structural modifications described below can be utilized.

[0305] An RGD peptide for use in the compositions and methods of the disclosure may be linear or cyclic, and may be modified, e.g., glycosylated or methylated, to facilitate targeting to a specific tissue(s). RGD-containing peptides and peptidomimetics may include D-amino acids, as well as synthetic RGD mimics. In addition to RGD, one can use other moieties that target the integrin ligand. In some embodiments, conjugates of this ligand target PECAM-1 or VEGF.

[0306] An RGD peptide moiety can be used to target a particular cell type, e.g., a tumor cell, such as an endothelial tumor cell or a breast cancer tumor cell (Zitzmann et al., Cancer Res., 62:5139-43, 2002). An RGD peptide can facilitate targeting of an dsRNA agent to tumors of a variety of other tissues, including the lung, kidney, spleen, or liver (Aoki et al., Cancer Gene Therapy 8:783-787, 2001). Typically, the RGD peptide will facilitate targeting of an iRNA agent to the kidney. The RGD peptide can be linear or cyclic, and can be modified, e.g., glycosylated or methylated to facilitate targeting to specific tissues. For example, a glycosylated RGD peptide can deliver a iRNA agent to a tumor cell expressing αvβ₃ (Haubner et al., Jour. Nucl. Med., 42:326-336, 2001).

[0307] A “cell permeation peptide” is capable of permeating a cell, e.g., a microbial cell, such as a bacterial or fungal cell, or a mammalian cell, such as a human cell. A microbial cell-permeating peptide can be, for example, an α-helical linear peptide (e.g., LL-37 or Ceropin P1), a disulfide bond-containing peptide (e.g., α -defensin, β-defensin or bactenecin), or a peptide containing only one or two dominating amino acids (e.g., PR-39 or indolicidin). A cell permeation peptide can also include a nuclear localization signal (NLS). For example, a cell permeation peptide can be a bipartite amphipathic peptide, such as MPG, which is derived from the fusion peptide domain of HIV-1 gp41 and the NLS of SV40 large T antigen (Simeoni et al., Nucl. Acids Res. 31:2717-2724, 2003).

### Carbohydrate Conjugates and Ligands

[0308] In some embodiments of the compositions and methods of the disclosure, an iRNA oligonucleotide further comprises a carbohydrate. The carbohydrate conjugated iRNA are advantageous for the in vivo delivery of nucleic acids, as well as compositions suitable for in vivo therapeutic use, as described herein. As used herein, “carbohydrate” refers to a compound which is either a carbohydrate per se made up of one or more monosaccharide units having at least 6 carbon atoms (which can be linear, branched or cyclic) with an oxygen, nitrogen or sulfur atom bonded to each carbon atom; or a compound having as a part thereof a carbohydrate moiety made up of one or more monosaccharide units each having at least six carbon atoms (which can be linear, branched or cyclic), with an oxygen, nitrogen or sulfur atom bonded to each carbon atom. Representative carbohydrates include the sugars (mono-, di-, tri- and oligosaccharides containing from about 4, 5, 6, 7, 8, or 9 monosaccharide units), and polysaccharides such as starches, glycogen, cellulose and polysaccharide gums. Specific monosaccharides include C5 and above (e.g., C5, C6, C7, or C8) sugars; di- and trisaccharides include sugars having two or three monosaccharide units (e.g., C5, C6, C7, or C8).

[0309] In certain embodiments, the compositions and methods of the disclosure include a C16 ligand. In exemplary embodiments, the C16 ligand of the disclosure has the following structure (exemplified here below for a uracil base, yet attachment of the C16 ligand is contemplated for a nucleotide presenting any base (C, G, A, etc.) or possessing any other modification as presented herein, provided that 2′ ribo attachment is preserved) and is attached at the 2′ position of the ribo within a residue that is so modified:

[chemical structure]

[0310] As shown above, a C16 ligand-modified residue presents a straight chain alkyl at the 2′-ribo position of an exemplary residue (here, a Uracil) that is so modified.

[0311] In some embodiments, a carbohydrate conjugate of a RNAi agent of the instant disclosure further comprises one or more additional ligands as described above, such as, but not limited to, a PK modulator or a cell permeation peptide.

[0312] Additional carbohydrate conjugates (and linkers) suitable for use in the present disclosure include those described in WO 2014/179620 and WO 2014/179627, the entire contents of each of which are incorporated herein by reference.

[0313] In certain embodiments, the compositions and methods of the disclosure include a vinyl phosphonate (VP) modification of an RNAi agent as described herein. In exemplary embodiments, a vinyl phosphonate of the disclosure has the following structure:

[chemical structure]

[0314] A vinyl phosphonate of the instant disclosure may be attached to either the antisense or the sense strand of a dsRNA of the disclosure. In certain preferred embodiments, a vinyl phosphonate of the instant disclosure is attached to the antisense strand of a dsRNA, optionally at the 5′ end of the antisense strand of the dsRNA.

[0315] Vinyl phosphate modifications are also contemplated for the compositions and methods of the instant disclosure. An exemplary vinyl phosphate structure is:

[chemical structure]

[0316] In some embodiments, a carbohydrate conjugate comprises a monosaccharide. In some embodiments, the monosaccharide is an N-acetylgalactosamine (GalNAc). GalNAc conjugates, which comprise one or more N-acetylgalactosamine (GalNAc) derivatives, are described, for example, in U.S. Pat. No. 8,106,022, the entire content of which is hereby incorporated herein by reference. In some embodiments, the GalNAc conjugate serves as a ligand that targets the iRNA to particular cells. In some embodiments, the GalNAc conjugate targets the iRNA to liver cells, e.g., by serving as a ligand for the asialoglycoprotein receptor of liver cells (e.g., hepatocytes).

[0317] In some embodiments, the carbohydrate conjugate comprises one or more GalNAc derivatives. The GalNAc derivatives may be attached via a linker, e.g., a bivalent or trivalent branched linker. In some embodiments the GalNAc conjugate is conjugated to the 3′ end of the sense strand. In some embodiments, the GalNAc conjugate is conjugated to the iRNA agent (e.g., to the 3′ end of the sense strand) via a linker, e.g., a linker as described herein.

[0318] In some embodiments, the GalNAc conjugate is

[chemical structure]

[0319] In some embodiments, the RNAi agent is attached to the carbohydrate conjugate via a linker as shown in the following schematic, wherein X is O or S:

[chemical structure]

[0320] In some embodiments, the RNAi agent is conjugated to L96 as defined in Table 1 and shown below:

[chemical structure]

[0321] In some embodiments, a carbohydrate conjugate for use in the compositions and methods of the disclosure is selected from the group consisting of:

[chemical structure]

[chemical structure]

[chemical structure]

[chemical structure]

[chemical structure]

[chemical structure]

[chemical structure]

[chemical structure]

[chemical structure]

[chemical structure]

[chemical structure]

[chemical structure]

[chemical structure]

[chemical structure]

[chemical structure]

[chemical structure]

[chemical structure]

[chemical structure]

[chemical structure]

[chemical structure]

[chemical structure]

[0322] Another representative carbohydrate conjugate for use in the embodiments described herein includes, but is not limited to,

[chemical structure]

[0323] (Formula XXIII), when one of X or Y is an oligonucleotide, the other is a hydrogen.

[0324] In some embodiments, the carbohydrate conjugate further comprises one or more additional ligands as described above, such as, but not limited to, a PK modulator and/or a cell permeation peptide.

[0325] In some embodiments, an iRNA of the disclosure is conjugated to a carbohydrate through a linker. Non-limiting examples of iRNA carbohydrate conjugates with linkers of the compositions and methods of the disclosure include, but are not limited to,

[chemical structure]

[chemical structure]

[chemical structure]

[chemical structure]

[chemical structure]

[chemical structure]

and

[chemical structure]

when one of X or Y is an oligonucleotide, the other is a hydrogen.

### E. Thermally Destabilizing Modifications

[0326] In certain embodiments, a dsRNA molecule can be optimized for RNA interference by incorporating thermally destabilizing modifications in the seed region of the antisense strand (i.e., at positions 2-9 of the 5′-end of the antisense strand) to reduce or inhibit off-target gene silencing. It has been discovered that dsRNAs with an antisense strand comprising at least one thermally destabilizing modification of the duplex within the first 9 nucleotide positions, counting from the 5′ end, of the antisense strand have reduced off-target gene silencing activity. Accordingly, in some embodiments, the antisense strand comprises at least one (e.g., one, two, three, four, five, or more) thermally destabilizing modification of the duplex within the first 9 nucleotide positions of the 5′ region of the antisense strand. In some embodiments, one or more thermally destabilizing modification(s) of the duplex is/are located in positions 2-9, or preferably positions 4-8, from the 5′-end of the antisense strand. In some further embodiments, the thermally destabilizing modification(s) of the duplex is/are located at position 6, 7, or 8 from the 5′-end of the antisense strand. In still some further embodiments, the thermally destabilizing modification of the duplex is located at position 7 from the 5′-end of the antisense strand. The term “thermally destabilizing modification(s)” includes modification(s) that would result with a dsRNA with a lower overall melting temperature (Tm) (preferably a Tm with one, two, three, or four degrees lower than the Tm of the dsRNA without having such modification(s). In some embodiments, the thermally destabilizing modification of the duplex is located at position 2, 3, 4, 5, or 9 from the 5′-end of the antisense strand.

[0327] The thermally destabilizing modifications can include, but are not limited to, abasic modification; mismatch with the opposing nucleotide in the opposing strand; and sugar modification such as 2′-deoxy modification or acyclic nucleotide, e.g., unlocked nucleic acids (UNA) or glycol nucleic acid (GNA).

[0328] Exemplified abasic modifications include, but are not limited to, the following:

[chemical structure]

[chemical structure]

[chemical structure]

[chemical structure]

[chemical structure]

[chemical structure]

[chemical structure]

[0329] Wherein R = H, Me, Et or OMe; R′ = H, Me, Et or OMe; R″ = H, Me, Et or OMe

[chemical structure]

[chemical structure]

[chemical structure]

[chemical structure]

wherein B is a modified or unmodified nucleobase.

[0330] Exemplified sugar modifications include, but are not limited to the following:

[chemical structure]

[chemical structure]

[chemical structure]

[chemical structure]

[chemical structure]

[chemical structure]

wherein B is a modified or unmodified nucleobase.

[0331] In some embodiments the thermally destabilizing modification of the duplex is selected from the group consisting of:

[chemical structure]

[chemical structure]

[chemical structure]

[chemical structure]

[chemical structure]

[chemical structure]

wherein B is a modified or unmodified nucleobase and the asterisk on each structure represents either R, S or racemic.

[0332] The term “acyclic nucleotide” refers to any nucleotide having an acyclic ribose sugar, for example, where any of bonds between the ribose carbons (e.g., C1'-C2', C2'-C3', C3'-C4', C4'-O4', or C1'-04' ) is absent or at least one of ribose carbons or oxygen (e.g., C 1', C2', C3', C4', or 04') are independently or in combination absent from the nucleotide. In some embodiments, acyclic nucleotide is

[chemical structure]

[chemical structure]

[chemical structure]

[chemical structure]

[chemical structure]

wherein B is a modified or unmodified nucleobase, R¹ and R² independently are H, halogen, OR₃, or alkyl; and R₃ is H, alkyl, cycloalkyl, aryl, aralkyl, heteroaryl or sugar). The term “UNA” refers to unlocked acyclic nucleic acid, wherein any of the bonds of the sugar has been removed, forming an unlocked “sugar” residue. In one example, UNA also encompasses monomers with bonds between C1′-C4' being removed (i.e. the covalent carbon-oxygen-carbon bond between the C1′ and C4′ carbons). In another example, the C2′-C3' bond (i.e. the covalent carbon-carbon bond between the C2′ and C3′ carbons) of the sugar is removed (see Mikhailov et. al., Tetrahedron Letters, 26 (17): 2059 (1985); and Fluiter et al., Mol. Biosyst., 10: 1039 (2009), which are hereby incorporated by reference in their entirety). The acyclic derivative provides greater backbone flexibility without affecting the Watson-Crick pairings. The acyclic nucleotide can be linked via 2′-5′ or 3′-5′ linkage.

[0333] The term ‘GNA’ refers to glycol nucleic acid which is a polymer similar to DNA or RNA but differing in the composition of its “backbone” in that is composed of repeating glycerol units linked by phosphodiester bonds:

[chemical structure]

[0334] The thermally destabilizing modification of the duplex can be mismatches (i.e., noncomplementary base pairs) between the thermally destabilizing nucleotide and the opposing nucleotide in the opposite strand within the dsRNA duplex. Exemplary mismatch base pairs include G:G, G:A, G:U, G:T, A:A, A:C, C:C, C:U, C:T, U:U, T:T, U:T, or a combination thereof. Other mismatch base pairings known in the art are also amenable to the present invention. A mismatch can occur between nucleotides that are either naturally occurring nucleotides or modified nucleotides, i.e., the mismatch base pairing can occur between the nucleobases from respective nucleotides independent of the modifications on the ribose sugars of the nucleotides. In certain embodiments, the dsRNA molecule contains at least one nucleobase in the mismatch pairing that is a 2′-deoxy nucleobase; e.g., the 2′-deoxy nucleobase is in the sense strand.

[0335] In some embodiments, the thermally destabilizing modification of the duplex in the seed region of the antisense strand includes nucleotides with impaired W-C H-bonding to complementary base on the target mRNA, such as:

[chemical structure]

[chemical structure]

[chemical structure]

[chemical structure]

[chemical structure]

[chemical structure]

[chemical structure]

[chemical structure]

[chemical structure]

[chemical structure]

[chemical structure]

[chemical structure]

[chemical structure]

[chemical structure]

[chemical structure]

[chemical structure]

[chemical structure]

[chemical structure]

[chemical structure]

[0336] More examples of abasic nucleotide, acyclic nucleotide modifications (including UNA and GNA), and mismatch modifications have been described in detail in WO 2011/133876, which is herein incorporated by reference in its entirety.

[0337] The thermally destabilizing modifications may also include universal base with reduced or abolished capability to form hydrogen bonds with the opposing bases, and phosphate modifications.

[0338] In some embodiments, the thermally destabilizing modification of the duplex includes nucleotides with non-canonical bases such as, but not limited to, nucleobase modifications with impaired or completely abolished capability to form hydrogen bonds with bases in the opposite strand. These nucleobase modifications have been evaluated for destabilization of the central region of the dsRNA duplex as described in WO 2010/0011895, which is herein incorporated by reference in its entirety. Exemplary nucleobase modifications are:

[chemical structure]

[chemical structure]

[chemical structure]

[chemical structure]

[chemical structure]

[chemical structure]

[chemical structure]

[chemical structure]

[0339] In some embodiments, the thermally destabilizing modification of the duplex in the seed region of the antisense strand includes one or more α-nucleotide complementary to the base on the target mRNA, such as:

[chemical structure]

[chemical structure]

[chemical structure]

[chemical structure]

wherein R is H, OH, OCH₃, F, NH₂, NHMe, NMe₂ or O-alkyl.

[0340] Exemplary phosphate modifications known to decrease the thermal stability of dsRNA duplexes compared to natural phosphodiester linkages are:

[chemical structure]

[chemical structure]

[chemical structure]

[chemical structure]

[chemical structure]

[chemical structure]

[0341] The alkyl for the R group can be a C₁-C₆alkyl. Specific alkyls for the R group include, but are not limited to methyl, ethyl, propyl, isopropyl, butyl, pentyl and hexyl.

[0342] As the skilled artisan will recognize, in view of the functional role of nucleobases is defining specificity of a RNAi agent of the disclosure, while nucleobase modifications can be performed in the various manners as described herein, e.g., to introduce destabilizing modifications into a RNAi agent of the disclosure, e.g., for purpose of enhancing on-target effect relative to off-target effect, the range of modifications available and, in general, present upon RNAi agents of the disclosure tends to be much greater for non-nucleobase modifications, e.g., modifications to sugar groups or phosphate backbones of polyribonucleotides. Such modifications are described in greater detail in other sections of the instant disclosure and are expressly contemplated for RNAi agents of the disclosure, either possessing native nucleobases or modified nucleobases as described above or elsewhere herein.

[0343] In addition to the antisense strand comprising a thermally destabilizing modification, the dsRNA can also comprise one or more stabilizing modifications. For example, the dsRNA can comprise at least two (e.g., two, three, four, five, six, seven, eight, nine, ten, or more) stabilizing modifications. Without limitations, the stabilizing modifications all can be present in one strand. In some embodiments, both the sense and the antisense strands comprise at least two stabilizing modifications. The stabilizing modification can occur on any nucleotide of the sense strand or antisense strand. For instance, the stabilizing modification can occur on every nucleotide on the sense strand or antisense strand; each stabilizing modification can occur in an alternating pattern on the sense strand or antisense strand; or the sense strand or antisense strand comprises both stabilizing modification in an alternating pattern. The alternating pattern of the stabilizing modifications on the sense strand may be the same or different from the antisense strand, and the alternating pattern of the stabilizing modifications on the sense strand can have a shift relative to the alternating pattern of the stabilizing modifications on the antisense strand.

[0344] In some embodiments, the antisense strand comprises at least two (e.g., two, three, four, five, six, seven, eight, nine, ten, or more) stabilizing modifications. Without limitations, a stabilizing modification in the antisense strand can be present at any positions.

[0345] In some embodiments, the antisense strand comprises stabilizing modifications at positions 2, 6, 8, 9, 14, and 16 from the 5′-end. In some other embodiments, the antisense strand comprises stabilizing modifications at positions 2, 6, 14, and 16 from the 5′-end. In still some other embodiments, the antisense strand comprises stabilizing modifications at positions 2, 14, and 16 from the 5′-end.

[0346] In some embodiments, the antisense strand comprises at least one stabilizing modification adjacent to the destabilizing modification. For example, the stabilizing modification can be the nucleotide at the 5′-end or the 3′-end of the destabilizing modification, i.e., at position -1 or + 1 from the position of the destabilizing modification. In some embodiments, the antisense strand comprises a stabilizing modification at each of the 5′-end and the 3′-end of the destabilizing modification, i.e., positions -1 and +1 from the position of the destabilizing modification.

[0347] In some embodiments, the antisense strand comprises at least two stabilizing modifications at the 3′-end of the destabilizing modification, i.e., at positions +1 and +2 from the position of the destabilizing modification.

[0348] In some embodiments, the sense strand comprises at least two (e.g., two, three, four, five, six, seven, eight, nine, ten or more) stabilizing modifications. Without limitations, a stabilizing modification in the sense strand can be present at any positions. In some embodiments, the sense strand comprises stabilizing modifications at positions 7, 10, and 11 from the 5′-end. In some other embodiments, the sense strand comprises stabilizing modifications at positions 7, 9, 10, and 11 from the 5′-end. In some embodiments, the sense strand comprises stabilizing modifications at positions opposite or complimentary to positions 11, 12, and 15 of the antisense strand, counting from the 5′-end of the antisense strand. In some other embodiments, the sense strand comprises stabilizing modifications at positions opposite or complimentary to positions 11, 12, 13, and 15 of the antisense strand, counting from the 5′-end of the antisense strand. In some embodiments, the sense strand comprises a block of two, three, or four stabilizing modifications.

[0349] In some embodiments, the sense strand does not comprise a stabilizing modification in position opposite or complimentary to the thermally destabilizing modification of the duplex in the antisense strand.

[0350] Exemplary thermally stabilizing modifications include, but are not limited to, 2′-fluoro modifications. Other thermally stabilizing modifications include, but are not limited to, LNA.

[0351] In some embodiments, the dsRNA of the disclosure comprises at least four (e.g., four, five, six, seven, eight, nine, ten, or more) 2′-fluoro nucleotides. Without limitations, the 2′-fluoro nucleotides all can be present in one strand. In some embodiments, both the sense and the antisense strands comprise at least two 2′-fluoro nucleotides. The 2′-fluoro modification can occur on any nucleotide of the sense strand or antisense strand. For instance, the 2′-fluoro modification can occur on every nucleotide on the sense strand or antisense strand; each 2′-fluoro modification can occur in an alternating pattern on the sense strand or antisense strand; or the sense strand or antisense strand comprises both 2′-fluoro modifications in an alternating pattern. The alternating pattern of the 2′-fluoro modifications on the sense strand may be the same or different from the antisense strand, and the alternating pattern of the 2′-fluoro modifications on the sense strand can have a shift relative to the alternating pattern of the 2′-fluoro modifications on the antisense strand.

[0352] In some embodiments, the antisense strand comprises at least two (e.g., two, three, four, five, six, seven, eight, nine, ten, or more) 2′-fluoro nucleotides. Without limitations, a 2′-fluoro modification in the antisense strand can be present at any positions. In some embodiments, the antisense comprises 2′-fluoro nucleotides at positions 2, 6, 8, 9, 14, and 16 from the 5′-end. In some other embodiments, the antisense comprises 2′-fluoro nucleotides at positions 2, 6, 14, and 16 from the 5′-end. In still some other embodiments, the antisense comprises 2′-fluoro nucleotides at positions 2, 14, and 16 from the 5′-end.

[0353] In some embodiments, the antisense strand comprises at least one 2′-fluoro nucleotide adjacent to the destabilizing modification. For example, the 2′-fluoro nucleotide can be the nucleotide at the 5′-end or the 3′-end of the destabilizing modification, i.e., at position -1 or +1 from the position of the destabilizing modification. In some embodiments, the antisense strand comprises a 2′-fluoro nucleotide at each of the 5′-end and the 3′-end of the destabilizing modification, i.e., positions -1 and +1 from the position of the destabilizing modification.

[0354] In some embodiments, the antisense strand comprises at least two 2′-fluoro nucleotides at the 3′-end of the destabilizing modification, i.e., at positions +1 and +2 from the position of the destabilizing modification.

[0355] In some embodiments, the sense strand comprises at least two (e.g., two, three, four, five, six, seven, eight, nine, ten, or more) 2′-fluoro nucleotides. Without limitations, a 2′-fluoro modification in the sense strand can be present at any positions. In some embodiments, the antisense comprises 2′-fluoro nucleotides at positions 7, 10, and 11 from the 5′-end. In some other embodiments, the sense strand comprises 2′-fluoro nucleotides at positions 7, 9, 10, and 11 from the 5′-end. In some embodiments, the sense strand comprises 2′-fluoro nucleotides at positions opposite or complimentary to positions 11, 12, and 15 of the antisense strand, counting from the 5′-end of the antisense strand. In some other embodiments, the sense strand comprises 2′-fluoro nucleotides at positions opposite or complimentary to positions 11, 12, 13, and 15 of the antisense strand, counting from the 5′-end of the antisense strand. In some embodiments, the sense strand comprises a block of two, three, or four 2′-fluoro nucleotides.

[0356] In some embodiments, the sense strand does not comprise a 2′-fluoro nucleotide in position opposite or complimentary to the thermally destabilizing modification of the duplex in the antisense strand.

[0357] In some embodiments, the dsRNA molecule of the disclosure comprises a 21 nucleotides (nt) sense strand and a 23 nucleotides (nt) antisense, wherein the antisense strand contains at least one thermally destabilizing nucleotide, where the at least one thermally destabilizing nucleotide occurs in the seed region of the antisense strand (i.e., at position 2-9 of the 5′-end of the antisense strand), wherein one end of the dsRNA is blunt, while the other end is comprises a 2 nt overhang, and wherein the dsRNA optionally further has at least one (e.g., one, two, three, four, five, six, or all seven) of the following characteristics: (i) the antisense comprises 2, 3, 4, 5, or 6 2′-fluoro modifications; (ii) the antisense comprises 1, 2, 3, 4, or 5 phosphorothioate internucleotide linkages; (iii) the sense strand is conjugated with a ligand; (iv) the sense strand comprises 2, 3, 4, or 5 2′-fluoro modifications; (v) the sense strand comprises 1, 2, 3, 4, or 5 phosphorothioate internucleotide linkages; (vi) the dsRNA comprises at least four 2′-fluoro modifications; and (vii) the dsRNA comprises a blunt end at 5′-end of the antisense strand. Preferably, the 2 nt overhang is at the 3′-end of the antisense.

[0358] In some embodiments, every nucleotide in the sense strand and antisense strand of the dsRNA molecule may be modified. Each nucleotide may be modified with the same or different modification which can include one or more alteration of one or both of the non-linking phosphate oxygens or of one or more of the linking phosphate oxygens; alteration of a constituent of the ribose sugar, e.g., of the 2′ hydroxyl on the ribose sugar; wholesale replacement of the phosphate moiety with “dephospho” linkers; modification or replacement of a naturally occurring base; and replacement or modification of the ribose-phosphate backbone.

[0359] As nucleic acids are polymers of subunits, many of the modifications occur at a position which is repeated within a nucleic acid, e.g., a modification of a base, or a phosphate moiety, or a non-linking O of a phosphate moiety. In some cases, the modification will occur at all of the subject positions in the nucleic acid but in many cases it will not. By way of example, a modification may only occur at a 3′ or 5′ terminal position, may only occur in a terminal region, e.g., at a position on a terminal nucleotide or in the last 2, 3, 4, 5, or 10 nucleotides of a strand. A modification may occur in a double strand region, a single strand region, or in both. A modification may occur only in the double strand region of an RNA or may only occur in a single strand region of an RNA. E.g., a phosphorothioate modification at a non-linking O position may only occur at one or both termini, may only occur in a terminal region, e.g., at a position on a terminal nucleotide or in the last 2, 3, 4, 5, or 10 nucleotides of a strand, or may occur in double strand and single strand regions, particularly at termini. The 5′ end or ends can be phosphorylated.

[0360] It may be possible, e.g., to enhance stability, to include particular bases in overhangs, or to include modified nucleotides or nucleotide surrogates, in single strand overhangs, e.g., in a 5′ or 3′ overhang, or in both. E.g., it can be desirable to include purine nucleotides in overhangs. In some embodiments all or some of the bases in a 3′ or 5′ overhang may be modified, e.g., with a modification described herein. Modifications can include, e.g., the use of modifications at the 2′ position of the ribose sugar with modifications that are known in the art, e.g., the use of deoxyribonucleotides, 2′-deoxy-2′-fluoro (2′-F) or 2′-O-methyl modified instead of the ribosugar of the nucleobase, and modifications in the phosphate group, e.g., phosphorothioate modifications. Overhangs need not be homologous with the target sequence.

[0361] In some embodiments, each residue of the sense strand and antisense strand is independently modified with LNA, HNA, CeNA, 2′-methoxyethyl, 2′- O-methyl, 2′-O-allyl, 2′-C- allyl, 2′-deoxy, or 2′-fluoro. The strands can contain more than one modification. In some embodiments, each residue of the sense strand and antisense strand is independently modified with 2′-O-methyl or 2′-fluoro. It is to be understood that these modifications are in addition to the at least one thermally destabilizing modification of the duplex present in the antisense strand.

[0362] At least two different modifications are typically present on the sense strand and antisense strand. Those two modifications may be the 2′-deoxy, 2′- O-methyl, or 2′-fluoro modifications, acyclic nucleotides or others. In some embodiments, the sense strand and antisense strand each comprises two differently modified nucleotides selected from 2′-O-methyl or 2′-deoxy. In some embodiments, each residue of the sense strand and antisense strand is independently modified with 2′-O-methyl nucleotide, 2′-deoxy nucleotide, 2′-deoxy-2′-fluoro nucleotide, 2′-O-N-methylacetamido (2′-O-NMA) nucleotide, a 2′-O-dimethylaminoethoxyethyl (2′-O-DMAEOE) nucleotide, 2′-O-aminopropyl (2′-O-AP) nucleotide, or 2′-ara-F nucleotide. Again, it is to be understood that these modifications are in addition to the at least one thermally destabilizing modification of the duplex present in the antisense strand.

[0363] In some embodiments, the dsRNA molecule of the disclosure comprises modifications of an alternating pattern, particular in the B1, B2, B3, B1′, B2′, B3′, B4′ regions. The term “alternating motif or “alternative pattern” as used herein refers to a motif having one or more modifications, each modification occurring on alternating nucleotides of one strand. The alternating nucleotide may refer to one per every other nucleotide or one per every three nucleotides, or a similar pattern. For example, if A, B and C each represent one type of modification to the nucleotide, the alternating motif can be “ABABABABABAB...,” “AABBAABBAABB...,” “AABAABAABAAB...,” “AAABAAABAAAB...,” “AAABBBAAABBB...,” or “ABCABCABCABC...,” etc.

[0364] The type of modifications contained in the alternating motif may be the same or different. For example, if A, B, C, D each represent one type of modification on the nucleotide, the alternating pattern, i.e., modifications on every other nucleotide, may be the same, but each of the sense strand or antisense strand can be selected from several possibilities of modifications within the alternating motif such as “ABABAB...”, “ACACAC...” “BDBDBD...” or “CDCDCD...,” etc.

[0365] In some embodiments, the dsRNA molecule of the disclosure comprises the modification pattern for the alternating motif on the sense strand relative to the modification pattern for the alternating motif on the antisense strand is shifted. The shift may be such that the modified group of nucleotides of the sense strand corresponds to a differently modified group of nucleotides of the antisense strand and vice versa. For example, the sense strand when paired with the antisense strand in the dsRNA duplex, the alternating motif in the sense strand may start with “ABABAB” from 5′-3′ of the strand and the alternating motif in the antisense strand may start with “BABABA” from 3′-5′of the strand within the duplex region. As another example, the alternating motif in the sense strand may start with “AABBAABB” from 5′-3′ of the strand and the alternating motif in the antisense strand may start with “BBAABBAA” from 3′-5′ of the strand within the duplex region, so that there is a complete or partial shift of the modification patterns between the sense strand and the antisense strand.

[0366] The dsRNA molecule of the disclosure may further comprise at least one phosphorothioate or methylphosphonate internucleotide linkage. The phosphorothioate or methylphosphonate internucleotide linkage modification may occur on any nucleotide of the sense strand or antisense strand or both in any position of the strand. For instance, the internucleotide linkage modification may occur on every nucleotide on the sense strand or antisense strand; each internucleotide linkage modification may occur in an alternating pattern on the sense strand or antisense strand; or the sense strand or antisense strand comprises both internucleotide linkage modifications in an alternating pattern. The alternating pattern of the internucleotide linkage modification on the sense strand may be the same or different from the antisense strand, and the alternating pattern of the internucleotide linkage modification on the sense strand may have a shift relative to the alternating pattern of the internucleotide linkage modification on the antisense strand.

[0367] In some embodiments, the dsRNA molecule comprises the phosphorothioate or methylphosphonate internucleotide linkage modification in the overhang region. For example, the overhang region comprises two nucleotides having a phosphorothioate or methylphosphonate internucleotide linkage between the two nucleotides. Internucleotide linkage modifications also may be made to link the overhang nucleotides with the terminal paired nucleotides within duplex region. For example, at least 2, 3, 4, or all the overhang nucleotides may be linked through phosphorothioate or methylphosphonate internucleotide linkage, and optionally, there may be additional phosphorothioate or methylphosphonate internucleotide linkages linking the overhang nucleotide with a paired nucleotide that is next to the overhang nucleotide. For instance, there may be at least two phosphorothioate internucleotide linkages between the terminal three nucleotides, in which two of the three nucleotides are overhang nucleotides, and the third is a paired nucleotide next to the overhang nucleotide. Preferably, these terminal three nucleotides may be at the 3′-end of the antisense strand.

[0368] In some embodiments, the sense strand of the dsRNA molecule comprises 1-10 blocks of two to ten phosphorothioate or methylphosphonate internucleotide linkages separated by 1, 2, 3, 4, 5, 6, 7, 8, 9, 10, 11, 12, 13, 14, 15, or 16 phosphate internucleotide linkages, wherein one of the phosphorothioate or methylphosphonate internucleotide linkages is placed at any position in the oligonucleotide sequence and the said sense strand is paired with an antisense strand comprising any combination of phosphorothioate, methylphosphonate, and phosphate internucleotide linkages or an antisense strand comprising either phosphorothioate or methylphosphonate or phosphate linkage.

[0369] In some embodiments, the antisense strand of the dsRNA molecule comprises two blocks of two phosphorothioate or methylphosphonate internucleotide linkages separated by 1, 2, 3, 4, 5, 6, 7, 8, 9, 10, 11, 12, 13, 14, 15, 16, 17, or 18 phosphate internucleotide linkages, wherein one of the phosphorothioate or methylphosphonate internucleotide linkages is placed at any position in the oligonucleotide sequence and the said antisense strand is paired with a sense strand comprising any combination of phosphorothioate, methylphosphonate, and phosphate internucleotide linkages or an antisense strand comprising either phosphorothioate or methylphosphonate or phosphate linkage.

[0370] In some embodiments, the antisense strand of the dsRNA molecule comprises two blocks of three phosphorothioate or methylphosphonate internucleotide linkages separated by 1, 2, 3, 4, 5, 6, 7, 8, 9, 10, 11, 12, 13, 14, 15, or 16 phosphate internucleotide linkages, wherein one of the phosphorothioate or methylphosphonate internucleotide linkages is placed at any position in the oligonucleotide sequence and the said antisense strand is paired with a sense strand comprising any combination of phosphorothioate, methylphosphonate, and phosphate internucleotide linkages or an antisense strand comprising either phosphorothioate or methylphosphonate or phosphate linkage.

[0371] In some embodiments, the antisense strand of the dsRNA molecule comprises two blocks of four phosphorothioate or methylphosphonate internucleotide linkages separated by 1, 2, 3, 4, 5, 6, 7, 8, 9, 10, 11, 12, 13, or 14 phosphate internucleotide linkages, wherein one of the phosphorothioate or methylphosphonate internucleotide linkages is placed at any position in the oligonucleotide sequence and the said antisense strand is paired with a sense strand comprising any combination of phosphorothioate, methylphosphonate, and phosphate internucleotide linkages or an antisense strand comprising either phosphorothioate or methylphosphonate or phosphate linkage.

[0372] In some embodiments, the antisense strand of the dsRNA molecule comprises two blocks of five phosphorothioate or methylphosphonate internucleotide linkages separated by 1, 2, 3, 4, 5, 6, 7, 8, 9, 10, 11, or 12 phosphate internucleotide linkages, wherein one of the phosphorothioate or methylphosphonate internucleotide linkages is placed at any position in the oligonucleotide sequence and the said antisense strand is paired with a sense strand comprising any combination of phosphorothioate, methylphosphonate, and phosphate internucleotide linkages or an antisense strand comprising either phosphorothioate or methylphosphonate or phosphate linkage.

[0373] In some embodiments, the antisense strand of the dsRNA molecule comprises two blocks of six phosphorothioate or methylphosphonate internucleotide linkages separated by 1, 2, 3, 4, 5, 6, 7, 8, 9, or 10 phosphate internucleotide linkages, wherein one of the phosphorothioate or methylphosphonate internucleotide linkages is placed at any position in the oligonucleotide sequence and the said antisense strand is paired with a sense strand comprising any combination of phosphorothioate, methylphosphonate, and phosphate internucleotide linkages or an antisense strand comprising either phosphorothioate or methylphosphonate or phosphate linkage.

[0374] In some embodiments, the antisense strand of the dsRNA molecule comprises two blocks of seven phosphorothioate or methylphosphonate internucleotide linkages separated by 1, 2, 3, 4, 5, 6, 7, or 8 phosphate internucleotide linkages, wherein one of the phosphorothioate or methylphosphonate internucleotide linkages is placed at any position in the oligonucleotide sequence and the said antisense strand is paired with a sense strand comprising any combination of phosphorothioate, methylphosphonate, and phosphate internucleotide linkages or an antisense strand comprising either phosphorothioate or methylphosphonate or phosphate linkage.

[0375] In some embodiments, the antisense strand of the dsRNA molecule comprises two blocks of eight phosphorothioate or methylphosphonate internucleotide linkages separated by 1, 2, 3, 4, 5, or 6 phosphate internucleotide linkages, wherein one of the phosphorothioate or methylphosphonate internucleotide linkages is placed at any position in the oligonucleotide sequence and the said antisense strand is paired with a sense strand comprising any combination of phosphorothioate, methylphosphonate, and phosphate internucleotide linkages or an antisense strand comprising either phosphorothioate or methylphosphonate or phosphate linkage.

[0376] In some embodiments, the antisense strand of the dsRNA molecule comprises two blocks of nine phosphorothioate or methylphosphonate internucleotide linkages separated by 1, 2, 3, or 4 phosphate internucleotide linkages, wherein one of the phosphorothioate or methylphosphonate internucleotide linkages is placed at any position in the oligonucleotide sequence and the said antisense strand is paired with a sense strand comprising any combination of phosphorothioate, methylphosphonate, and phosphate internucleotide linkages or an antisense strand comprising either phosphorothioate or methylphosphonate or phosphate linkage.

[0377] In some embodiments, the dsRNA molecule of the disclosure further comprises one or more phosphorothioate or methylphosphonate internucleotide linkage modification within positions 1-10 of the termini position(s) of the sense or antisense strand. For example, at least 2, 3, 4, 5, 6, 7, 8, 9, or 10 nucleotides may be linked through phosphorothioate or methylphosphonate internucleotide linkage at one end or both ends of the sense or antisense strand.

[0378] In some embodiments, the dsRNA molecule of the disclosure further comprises one or more phosphorothioate or methylphosphonate internucleotide linkage modification within positions 1-10 of the internal region of the duplex of each of the sense or antisense strand. For example, at least 2, 3, 4, 5, 6, 7, 8, 9, or 10 nucleotides may be linked through phosphorothioate methylphosphonate internucleotide linkage at position 8-16 of the duplex region counting from the 5′-end of the sense strand; the dsRNA molecule can optionally further comprise one or more phosphorothioate or methylphosphonate internucleotide linkage modification within positions 1-10 of the termini position(s).

[0379] In some embodiments, the dsRNA molecule of the disclosure further comprises one to five phosphorothioate or methylphosphonate internucleotide linkage modification(s) within position 1-5 and one to five phosphorothioate or methylphosphonate internucleotide linkage modification(s) within position 18-23 of the sense strand (counting from the 5′-end), and one to five phosphorothioate or methylphosphonate internucleotide linkage modification at positions 1 and 2 and one to five within positions 18-23 of the antisense strand (counting from the 5′-end).

[0380] In some embodiments, the dsRNA molecule of the disclosure further comprises one phosphorothioate internucleotide linkage modification within position 1-5 and one phosphorothioate or methylphosphonate internucleotide linkage modification within position 18-23 of the sense strand (counting from the 5′-end), and one phosphorothioate internucleotide linkage modification at positions 1 and 2 and two phosphorothioate or methylphosphonate internucleotide linkage modifications within positions 18-23 of the antisense strand (counting from the 5′-end).

[0381] In some embodiments, the dsRNA molecule of the disclosure further comprises two phosphorothioate internucleotide linkage modifications within position 1-5 and one phosphorothioate internucleotide linkage modification within position 18-23 of the sense strand (counting from the 5′-end), and one phosphorothioate internucleotide linkage modification at positions 1 and 2 and two phosphorothioate internucleotide linkage modifications within positions 18-23 of the antisense strand (counting from the 5′-end).

[0382] In some embodiments, the dsRNA molecule of the disclosure further comprises two phosphorothioate internucleotide linkage modifications within position 1-5 and two phosphorothioate internucleotide linkage modifications within position 18-23 of the sense strand (counting from the 5′-end), and one phosphorothioate internucleotide linkage modification at positions 1 and 2 and two phosphorothioate internucleotide linkage modifications within positions 18-23 of the antisense strand (counting from the 5′-end).

[0383] In some embodiments, the dsRNA molecule of the disclosure further comprises two phosphorothioate internucleotide linkage modifications within position 1-5 and two phosphorothioate internucleotide linkage modifications within position 18-23 of the sense strand (counting from the 5′-end), and one phosphorothioate internucleotide linkage modification at positions 1 and 2 and one phosphorothioate internucleotide linkage modification within positions 18-23 of the antisense strand (counting from the 5′-end).

[0384] In some embodiments, the dsRNA molecule of the disclosure further comprises one phosphorothioate internucleotide linkage modification within position 1-5 and one phosphorothioate internucleotide linkage modification within position 18-23 of the sense strand (counting from the 5′-end), and two phosphorothioate internucleotide linkage modifications at positions 1 and 2 and two phosphorothioate internucleotide linkage modifications within positions 18-23 of the antisense strand (counting from the 5′-end).

[0385] In some embodiments, the dsRNA molecule of the disclosure further comprises one phosphorothioate internucleotide linkage modification within position 1-5 and one within position 18-23 of the sense strand (counting from the 5′-end), and two phosphorothioate internucleotide linkage modification at positions 1 and 2 and one phosphorothioate internucleotide linkage modification within positions 18-23 of the antisense strand (counting from the 5′-end).

[0386] In some embodiments, the dsRNA molecule of the disclosure further comprises one phosphorothioate internucleotide linkage modification within position 1-5 (counting from the 5′-end) of the sense strand, and two phosphorothioate internucleotide linkage modifications at positions 1 and 2 and one phosphorothioate internucleotide linkage modification within positions 18-23 of the antisense strand (counting from the 5′-end).

[0387] In some embodiments, the dsRNA molecule of the disclosure further comprises two phosphorothioate internucleotide linkage modifications within position 1-5 (counting from the 5′-end) of the sense strand, and one phosphorothioate internucleotide linkage modification at positions 1 and 2 and two phosphorothioate internucleotide linkage modifications within positions 18-23 of the antisense strand (counting from the 5′-end).

[0388] In some embodiments, the dsRNA molecule of the disclosure further comprises two phosphorothioate internucleotide linkage modifications within position 1-5 and one within position 18-23 of the sense strand (counting from the 5′-end), and two phosphorothioate internucleotide linkage modifications at positions 1 and 2 and one phosphorothioate internucleotide linkage modification within positions 18-23 of the antisense strand (counting from the 5′-end).

[0389] In some embodiments, the dsRNA molecule of the disclosure further comprises two phosphorothioate internucleotide linkage modifications within position 1-5 and one phosphorothioate internucleotide linkage modification within position 18-23 of the sense strand (counting from the 5′-end), and two phosphorothioate internucleotide linkage modifications at positions 1 and 2 and two phosphorothioate internucleotide linkage modifications within positions 18-23 of the antisense strand (counting from the 5′-end).

[0390] In some embodiments, the dsRNA molecule of the disclosure further comprises two phosphorothioate internucleotide linkage modifications within position 1-5 and one phosphorothioate internucleotide linkage modification within position 18-23 of the sense strand (counting from the 5′-end), and one phosphorothioate internucleotide linkage modification at positions 1 and 2 and two phosphorothioate internucleotide linkage modifications within positions 18-23 of the antisense strand (counting from the 5′-end).

[0391] In some embodiments, the dsRNA molecule of the disclosure further comprises two phosphorothioate internucleotide linkage modifications at position 1 and 2, and two phosphorothioate internucleotide linkage modifications at position 20 and 21 of the sense strand (counting from the 5′-end), and one phosphorothioate internucleotide linkage modification at positions 1 and one at position 21 of the antisense strand (counting from the 5′-end).

[0392] In some embodiments, the dsRNA molecule of the disclosure further comprises one phosphorothioate internucleotide linkage modification at position 1, and one phosphorothioate internucleotide linkage modification at position 21 of the sense strand (counting from the 5′-end), and two phosphorothioate internucleotide linkage modifications at positions 1 and 2 and two phosphorothioate internucleotide linkage modifications at positions 20 and 21 the antisense strand (counting from the 5′-end).

[0393] In some embodiments, the dsRNA molecule of the disclosure further comprises two phosphorothioate internucleotide linkage modifications at position 1 and 2, and two phosphorothioate internucleotide linkage modifications at position 21 and 22 of the sense strand (counting from the 5′-end), and one phosphorothioate internucleotide linkage modification at positions 1 and one phosphorothioate internucleotide linkage modification at position 21 of the antisense strand (counting from the 5′-end).

[0394] In some embodiments, the dsRNA molecule of the disclosure further comprises one phosphorothioate internucleotide linkage modification at position 1, and one phosphorothioate internucleotide linkage modification at position 21 of the sense strand (counting from the 5′-end), and two phosphorothioate internucleotide linkage modifications at positions 1 and 2 and two phosphorothioate internucleotide linkage modifications at positions 21 and 22 the antisense strand (counting from the 5′-end).

[0395] In some embodiments, the dsRNA molecule of the disclosure further comprises two phosphorothioate internucleotide linkage modifications at position 1 and 2, and two phosphorothioate internucleotide linkage modifications at position 22 and 23 of the sense strand (counting from the 5′-end), and one phosphorothioate internucleotide linkage modification at positions 1 and one phosphorothioate internucleotide linkage modification at position 21 of the antisense strand (counting from the 5′-end).

[0396] In some embodiments, the dsRNA molecule of the disclosure further comprises one phosphorothioate internucleotide linkage modification at position 1, and one phosphorothioate internucleotide linkage modification at position 21 of the sense strand (counting from the 5′-end), and two phosphorothioate internucleotide linkage modifications at positions 1 and 2 and two phosphorothioate internucleotide linkage modifications at positions 23 and 23 the antisense strand (counting from the 5′-end).

[0397] In some embodiments, compound of the disclosure comprises a pattern of backbone chiral centers. In some embodiments, a common pattern of backbone chiral centers comprises at least 5 internucleotidic linkages in the Sp configuration. In some embodiments, a common pattern of backbone chiral centers comprises at least 6 internucleotidic linkages in the Sp configuration. In some embodiments, a common pattern of backbone chiral centers comprises at least 7 internucleotidic linkages in the Sp configuration. In some embodiments, a common pattern of backbone chiral centers comprises at least 8 internucleotidic linkages in the Sp configuration. In some embodiments, a common pattern of backbone chiral centers comprises at least 9 internucleotidic linkages in the Sp configuration. In some embodiments, a common pattern of backbone chiral centers comprises at least 10 internucleotidic linkages in the Sp configuration. In some embodiments, a common pattern of backbone chiral centers comprises at least 11 internucleotidic linkages in the Sp configuration. In some embodiments, a common pattern of backbone chiral centers comprises at least 12 internucleotidic linkages in the Sp configuration. In some embodiments, a common pattern of backbone chiral centers comprises at least 13 internucleotidic linkages in the Sp configuration. In some embodiments, a common pattern of backbone chiral centers comprises at least 14 internucleotidic linkages in the Sp configuration. In some embodiments, a common pattern of backbone chiral centers comprises at least 15 internucleotidic linkages in the Sp configuration. In some embodiments, a common pattern of backbone chiral centers comprises at least 16 internucleotidic linkages in the Sp configuration. In some embodiments, a common pattern of backbone chiral centers comprises at least 17 internucleotidic linkages in the Sp configuration. In some embodiments, a common pattern of backbone chiral centers comprises at least 18 internucleotidic linkages in the Sp configuration. In some embodiments, a common pattern of backbone chiral centers comprises at least 19 internucleotidic linkages in the Sp configuration. In some embodiments, a common pattern of backbone chiral centers comprises no more than 8 internucleotidic linkages in the Rp configuration. In some embodiments, a common pattern of backbone chiral centers comprises no more than 7 internucleotidic linkages in the Rp configuration. In some embodiments, a common pattern of backbone chiral centers comprises no more than 6 internucleotidic linkages in the Rp configuration. In some embodiments, a common pattern of backbone chiral centers comprises no more than 5 internucleotidic linkages in the Rp configuration. In some embodiments, a common pattern of backbone chiral centers comprises no more than 4 internucleotidic linkages in the Rp configuration. In some embodiments, a common pattern of backbone chiral centers comprises no more than 3 internucleotidic linkages in the Rp configuration. In some embodiments, a common pattern of backbone chiral centers comprises no more than 2 internucleotidic linkages in the Rp configuration. In some embodiments, a common pattern of backbone chiral centers comprises no more than 1 internucleotidic linkages in the Rp configuration. In some embodiments, a common pattern of backbone chiral centers comprises no more than 8 internucleotidic linkages which are not chiral (as a non-limiting example, a phosphodiester). In some embodiments, a common pattern of backbone chiral centers comprises no more than 7 internucleotidic linkages which are not chiral. In some embodiments, a common pattern of backbone chiral centers comprises no more than 6 internucleotidic linkages which are not chiral. In some embodiments, a common pattern of backbone chiral centers comprises no more than 5 internucleotidic linkages which are not chiral. In some embodiments, a common pattern of backbone chiral centers comprises no more than 4 internucleotidic linkages which are not chiral. In some embodiments, a common pattern of backbone chiral centers comprises no more than 3 internucleotidic linkages which are not chiral. In some embodiments, a common pattern of backbone chiral centers comprises no more than 2 internucleotidic linkages which are not chiral. In some embodiments, a common pattern of backbone chiral centers comprises no more than 1 internucleotidic linkages which are not chiral. In some embodiments, a common pattern of backbone chiral centers comprises at least 10 internucleotidic linkages in the Sp configuration, and no more than 8 internucleotidic linkages which are not chiral. In some embodiments, a common pattern of backbone chiral centers comprises at least 11 internucleotidic linkages in the Sp configuration, and no more than 7 internucleotidic linkages which are not chiral. In some embodiments, a common pattern of backbone chiral centers comprises at least 12 internucleotidic linkages in the Sp configuration, and no more than 6 internucleotidic linkages which are not chiral. In some embodiments, a common pattern of backbone chiral centers comprises at least 13 internucleotidic linkages in the Sp configuration, and no more than 6 internucleotidic linkages which are not chiral. In some embodiments, a common pattern of backbone chiral centers comprises at least 14 internucleotidic linkages in the Sp configuration, and no more than 5 internucleotidic linkages which are not chiral. In some embodiments, a common pattern of backbone chiral centers comprises at least 15 internucleotidic linkages in the Sp configuration, and no more than 4 internucleotidic linkages which are not chiral. In some embodiments, the internucleotidic linkages in the Sp configuration are optionally contiguous or not contiguous. In some embodiments, the internucleotidic linkages in the Rp configuration are optionally contiguous or not contiguous. In some embodiments, the internucleotidic linkages which are not chiral are optionally contiguous or not contiguous.

[0398] In some embodiments, compound of the disclosure comprises a block is a stereochemistry block. In some embodiments, a block is an Rp block in that each internucleotidic linkage of the block is Rp. In some embodiments, a 5′ -block is an Rp block. In some embodiments, a 3′-block is an Rp block. In some embodiments, a block is an Sp block in that each internucleotidic linkage of the block is Sp. In some embodiments, a 5′-block is an Sp block. In some embodiments, a 3′-block is an Sp block. In some embodiments, provided oligonucleotides comprise both Rp and Sp blocks. In some embodiments, provided oligonucleotides comprise one or more Rp but no Sp blocks. In some embodiments, provided oligonucleotides comprise one or more Sp but no Rp blocks. In some embodiments, provided oligonucleotides comprise one or more PO blocks wherein each internucleotidic linkage in a natural phosphate linkage.

[0399] In some embodiments, compound of the disclosure comprises a 5′-block is an Sp block wherein each sugar moiety comprises a 2′-F modification. In some embodiments, a 5′-block is an Sp block wherein each of internucleotidic linkage is a modified internucleotidic linkage and each sugar moiety comprises a 2′-F modification. In some embodiments, a 5′-block is an Sp block wherein each of internucleotidic linkage is a phosphorothioate linkage and each sugar moiety comprises a 2′-F modification. In some embodiments, a 5′-block comprises 4 or more nucleoside units. In some embodiments, a 5′-block comprises 5 or more nucleoside units. In some embodiments, a 5′-block comprises 6 or more nucleoside units. In some embodiments, a 5′-block comprises 7 or more nucleoside units. In some embodiments, a 3′ -block is an Sp block wherein each sugar moiety comprises a 2′-F modification. In some embodiments, a 3′-block is an Sp block wherein each of internucleotidic linkage is a modified internucleotidic linkage and each sugar moiety comprises a 2′-F modification. In some embodiments, a 3′ -block is an Sp block wherein each of internucleotidic linkage is a phosphorothioate linkage and each sugar moiety comprises a 2′-F modification. In some embodiments, a 3′-block comprises 4 or more nucleoside units. In some embodiments, a 3′-block comprises 5 or more nucleoside units. In some embodiments, a 3′-block comprises 6 or more nucleoside units. In some embodiments, a 3′-block comprises 7 or more nucleoside units.

[0400] In some embodiments, compound of the disclosure comprises a type of nucleoside in a region or an oligonucleotide is followed by a specific type of internucleotidic linkage, e.g., natural phosphate linkage, modified internucleotidic linkage, Rp chiral internucleotidic linkage, Sp chiral internucleotidic linkage, etc. In some embodiments, A is followed by Sp. In some embodiments, A is followed by Rp. In some embodiments, A is followed by natural phosphate linkage (PO). In some embodiments, U is followed by Sp. In some embodiments, U is followed by Rp. In some embodiments, U is followed by natural phosphate linkage (PO). In some embodiments, C is followed by Sp. In some embodiments, C is followed by Rp. In some embodiments, C is followed by natural phosphate linkage (PO). In some embodiments, G is followed by Sp. In some embodiments, G is followed by Rp. In some embodiments, G is followed by natural phosphate linkage (PO). In some embodiments, C and U are followed by Sp. In some embodiments, C and U are followed by Rp. In some embodiments, C and U are followed by natural phosphate linkage (PO). In some embodiments, A and G are followed by Sp. In some embodiments, A and G are followed by Rp.

[0401] In some embodiments, the dsRNA molecule of the disclosure comprises mismatch(es) with the target, within the duplex, or combinations thereof. The mismatch can occur in the overhang region or the duplex region. The base pair can be ranked on the basis of their propensity to promote dissociation or melting (e.g., on the free energy of association or dissociation of a particular pairing, the simplest approach is to examine the pairs on an individual pair basis, though next neighbor or similar analysis can also be used). In terms of promoting dissociation: A:U is preferred over G:C; G:U is preferred over G:C; and I:C is preferred over G:C (I=inosine). Mismatches, e.g., non-canonical or other than canonical pairings (as described elsewhere herein) are preferred over canonical (A:T, A:U, G:C) pairings; and pairings which include a universal base are preferred over canonical pairings.

[0402] In some embodiments, the dsRNA molecule of the disclosure comprises at least one of the first 1, 2, 3, 4, or 5 base pairs within the duplex regions from the 5′- end of the antisense strand can be chosen independently from the group of: A:U, G:U, I:C, and mismatched pairs, e.g., non-canonical or other than canonical pairings or pairings which include a universal base, to promote the dissociation of the antisense strand at the 5′-end of the duplex.

[0403] In some embodiments, the nucleotide at the 1 position within the duplex region from the 5′-end in the antisense strand is selected from the group consisting of A, dA, dU, U, and dT. Alternatively, at least one of the first 1, 2 or 3 base pair within the duplex region from the 5′- end of the antisense strand is an AU base pair. For example, the first base pair within the duplex region from the 5′- end of the antisense strand is an AU base pair.

[0404] It was found that introducing 4′-modified or 5′-modified nucleotide to the 3′-end of a phosphodiester (PO), phosphorothioate (PS), or phosphorodithioate (PS2) linkage of a dinucleotide at any position of single stranded or double stranded oligonucleotide can exert steric effect to the internucleotide linkage and, hence, protecting or stabilizing it against nucleases.

[0405] In some embodiments, 5′-modified nucleoside is introduced at the 3′-end of a dinucleotide at any position of single stranded or double stranded siRNA. For instance, a 5′-alkylated nucleoside may be introduced at the 3′-end of a dinucleotide at any position of single stranded or double stranded siRNA. The alkyl group at the 5′ position of the ribose sugar can be racemic or chirally pure R or S isomer. An exemplary 5′-alkylated nucleoside is 5′-methyl nucleoside. The 5′-methyl can be either racemic or chirally pure R or S isomer.

[0406] In some embodiments, 4′-modified nucleoside is introduced at the 3′-end of a dinucleotide at any position of single stranded or double stranded siRNA. For instance, a 4′-alkylated nucleoside may be introduced at the 3′-end of a dinucleotide at any position of single stranded or double stranded siRNA. The alkyl group at the 4′ position of the ribose sugar can be racemic or chirally pure R or S isomer. An exemplary 4′-alkylated nucleoside is 4′-methyl nucleoside. The 4′-methyl can be either racemic or chirally pure R or S isomer. Alternatively, a 4′-O-alkylated nucleoside may be introduced at the 3′-end of a dinucleotide at any position of single stranded or double stranded siRNA. The 4′-O-alkyl of the ribose sugar can be racemic or chirally pure R or S isomer. An exemplary 4′-O-alkylated nucleoside is 4′-O-methyl nucleoside. The 4′-O-methyl can be either racemic or chirally pure R or S isomer.

[0407] In some embodiments, 5′-alkylated nucleoside is introduced at any position on the sense strand or antisense strand of a dsRNA, and such modification maintains or improves potency of the dsRNA. The 5′-alkyl can be either racemic or chirally pure R or S isomer. An exemplary 5′-alkylated nucleoside is 5′-methyl nucleoside. The 5′-methyl can be either racemic or chirally pure R or S isomer.

[0408] In some embodiments, 4′-alkylated nucleoside is introduced at any position on the sense strand or antisense strand of a dsRNA, and such modification maintains or improves potency of the dsRNA. The 4′-alkyl can be either racemic or chirally pure R or S isomer. An exemplary 4′-alkylated nucleoside is 4′-methyl nucleoside. The 4′-methyl can be either racemic or chirally pure R or S isomer.

[0409] In some embodiments, 4′-O-alkylated nucleoside is introduced at any position on the sense strand or antisense strand of a dsRNA, and such modification maintains or improves potency of the dsRNA. The 5′-alkyl can be either racemic or chirally pure R or S isomer. An exemplary 4′-O-alkylated nucleoside is 4′-O-methyl nucleoside. The 4′-O-methyl can be either racemic or chirally pure R or S isomer.

[0410] In some embodiments, the dsRNA molecule of the disclosure can comprise 2′-5′ linkages (with 2′—H, 2′—OH, and 2′—OMe and with P═O or P═S). For example, the 2′-5′ linkages modifications can be used to promote nuclease resistance or to inhibit binding of the sense to the antisense strand, or can be used at the 5′ end of the sense strand to avoid sense strand activation by RISC.

[0411] In another embodiment, the dsRNA molecule of the disclosure can comprise L sugars (e.g., L ribose, L-arabinose with 2′—H, 2′—OH and 2′—OMe). For example, these L sugars modifications can be used to promote nuclease resistance or to inhibit binding of the sense to the antisense strand, or can be used at the 5′ end of the sense strand to avoid sense strand activation by RISC.

[0412] Various publications describe multimeric siRNA which can all be used with the dsRNA of the disclosure. Such publications include WO2007/091269, US 7858769, WO2010/141511, WO2007/117686, WO2009/014887, and WO2011/031520 which are hereby incorporated by their entirely.

[0413] In some embodiments dsRNA molecules of the disclosure are 5′ phosphorylated or include a phosphoryl analog at the 5′ prime terminus. 5′-phosphate modifications include those which are compatible with RISC mediated gene silencing. Suitable modifications include: 5′-monophosphate ((HO)₂(O)P—O—5′); 5′-diphosphate ((HO)₂(O)P—O—P(HO)(O)—O—5′); 5′-triphosphate ((HO)₂(O)P—O—(HO)(O)P—O—P(HO)(O)—O—5′); 5′-guanosine cap (7-methylated or non-methylated) (7m-G-O-5′—(HO)(O)P—O—(HO)(O)P—O—P(HO)(O)—O—5′); 5′-adenosine cap (Appp), and any modified or unmodified nucleotide cap structure (N-O-5′—(HO)(O)P—O—(HO)(O)P—O—P(HO)(O)—O—5′); 5′-monothiophosphate (phosphorothioate; (HO)₂(S)P—O—5′); 5′-monodithiophosphate (phosphorodithioate; (HO)(HS)(S)P—O—5′), 5′-phosphorothiolate ((HO)2(O)P—S—5′); any additional combination of oxygen/sulfur replaced monophosphate, diphosphate and triphosphates (e.g. 5′-alpha-thiotriphosphate, 5′-gamma-thiotriphosphate, etc.), 5′-phosphoramidates ((HO)₂(O)P—NH—5′, (HO)(NH₂)(O)P—O—5′), 5′-alkylphosphonates (R=alkyl=methyl, ethyl, isopropyl, propyl, etc., e.g. RP(OH)(O)—O—5′-, 5′-alkenylphosphonates (i.e. vinyl, substituted vinyl), (OH)₂(O)P—5′—CH2—), 5′-alkyletherphosphonates (R=alkylether=methoxymethyl (MeOCH2—), ethoxymethyl, etc., e.g. RP(OH)(O)—O—5′-). In one example, the modification can in placed in the antisense strand of a dsRNA molecule.

### Linkers

[0414] In some embodiments, the conjugate or ligand described herein can be attached to an iRNA oligonucleotide with various linkers that can be cleavable or non-cleavable.

[0415] Linkers typically comprise a direct bond or an atom such as oxygen or sulfur, a unit such as NR8, C(O), C(O)NH, SO, SO₂, SO₂NH or a chain of atoms, such as, but not limited to, substituted or unsubstituted alkyl, substituted or unsubstituted alkenyl, substituted or unsubstituted alkynyl, arylalkyl, arylalkenyl, arylalkynyl, heteroarylalkyl, heteroarylalkenyl, heteroarylalkynyl, heterocyclylalkyl, heterocyclylalkenyl, heterocyclylalkynyl, aryl, heteroaryl, heterocyclyl, cycloalkyl, cycloalkenyl, alkylarylalkyl, alkylarylalkenyl, alkylarylalkynyl, alkenylarylalkyl, alkenylarylalkenyl, alkenylarylalkynyl, alkynylarylalkyl, alkynylarylalkenyl, alkynylarylalkynyl, alkylheteroarylalkyl, alkylheteroarylalkenyl, alkylheteroarylalkynyl, alkenylheteroarylalkyl, alkenylheteroarylalkenyl, alkenylheteroarylalkynyl, alkynylheteroarylalkyl, alkynylheteroarylalkenyl, alkynylheteroarylalkynyl, alkylheterocyclylalkyl, alkylheterocyclylalkenyl, alkylhererocyclylalkynyl, alkenylheterocyclylalkyl, alkenylheterocyclylalkenyl, alkenylheterocyclylalkynyl, alkynylheterocyclylalkyl, alkynylheterocyclylalkenyl, alkynylheterocyclylalkynyl, alkylaryl, alkenylaryl, alkynylaryl, alkylheteroaryl, alkenylheteroaryl, alkynylhereroaryl, which one or more methylenes can be interrupted or terminated by O, S, S(O), SO₂, N(R8), C(O), substituted or unsubstituted aryl, substituted or unsubstituted heteroaryl, substituted or unsubstituted heterocyclic; where R8 is hydrogen, acyl, aliphatic or substituted aliphatic. In some embodiments, the linker is between about 1-24 atoms, 2-24, 3-24, 4-24, 5-24, 6-24, 6-18, 7-18, 8-18 atoms, 7-17, 8-17, 6-16, 7-16, or 8-16 atoms.

[0416] In some embodiments, a dsRNA of the disclosure is conjugated to a bivalent or trivalent branched linker selected from the group of structures shown in any of formula (XXXI) -(XXXIV):

[chemical structure]

[chemical structure]

[chemical structure]

[chemical structure]

wherein:
[0417] q2A, q2B, q3A, q3B, q4A, q4B, q5A, q5B and q5C represent independently for each occurrence 0-20 and wherein the repeating unit can be the same or different;
[0418] P^{2A}, P^{2B}, P^{3A}, P^{3B}, P^{4A}, P^{4B}, P^{5A}, P^{5B}, P^{5C}, T^{2A}, T^{2B}, T^{3A}, T^{3B}, T^{4A}, T^{4B}, T^{4A}, T^{5B}, T^{5C} are each independently for each occurrence absent, CO, NH, O, S, OC(O), NHC(O), CH₂, CH₂NH or CH₂O;
[0419] Q^{2A}, Q^{2B}, Q^{3A}, Q^{3B}, Q^{4A}, Q^{4B}, Q^{5A}, Q^{3B}, Q^{5C} are independently for each occurrence absent, alkylene, substituted alkylene wherein one or more methylenes can be interrupted or terminated by one or more of O, S, S(O), SO₂, N(R^{N}), C(R′)═C(R″), C═C or C(O);
[0420] R^{2A}, R^{2B}, R^{3A}, R^{3B}, R^{4A}, R^{4B}, R^{5A,} R^{5B}, R^{5C} are each independently for each occurrence absent, NH, O, S, CH₂, C(O)O, C(O)NH, NHCH(R^{a})C(O), —C(O)—CH(R^{a})—NH—, CO, CH═N—O,

[chemical structure]

[chemical structure]

[chemical structure]

[chemical structure]

[chemical structure]

or heterocyclyl;

[0421] L^{2A}, L^{2B}, L^{3A}, L^{3B}, L^{4A}, L^{4B}, L^{5A}, L^{5B} and L^{5C} represent the ligand; i.e. each independently for each occurrence a monosaccharide (such as GalNAc), disaccharide, trisaccharide, tetrasaccharide, oligosaccharide, or polysaccharide; and R^{a} is H or amino acid side chain. Trivalent conjugating GalNAc derivatives are particularly useful for use with RNAi agents for inhibiting the expression of a target gene, such as those of formula (XXXV):

[chemical structure]

wherein L^{5A}, L^{5B} and L^{5C} represent a monosaccharide, such as GalNAc derivative.

[0422] Examples of suitable bivalent and trivalent branched linker groups conjugating GalNAc derivatives include, but are not limited to, the structures recited above as formulas II, VII, XI, X, and XIII.

[0423] A cleavable linking group is one which is sufficiently stable outside the cell, but which upon entry into a target cell is cleaved to release the two parts the linker is holding together. In a some embodiments, the cleavable linking group is cleaved at least about 10 times, 20 times, 30 times, 40 times, 50 times, 60 times, 70 times, 80 times, 90 times or more, or at least about 100 times faster in a target cell or under a first reference condition (which can, e.g., be selected to mimic or represent intracellular conditions) than in the blood of a subject, or under a second reference condition (which can, e.g., be selected to mimic or represent conditions found in the blood or serum).

[0424] Cleavable linking groups are susceptible to cleavage agents, e.g., pH, redox potential or the presence of degradative molecules. Generally, cleavage agents are more prevalent or found at higher levels or activities inside cells than in serum or blood. Examples of such degradative agents include: redox agents which are selected for particular substrates or which have no substrate specificity, including, e.g., oxidative or reductive enzymes or reductive agents such as mercaptans, present in cells, that can degrade a redox cleavable linking group by reduction; esterases; endosomes or agents that can create an acidic environment, e.g., those that result in a pH of five or lower; enzymes that can hydrolyze or degrade an acid cleavable linking group by acting as a general acid, peptidases (which can be substrate specific), and phosphatases.

[0425] A cleavable linkage group, such as a disulfide bond can be susceptible to pH. The pH of human serum is 7.4, while the average intracellular pH is slightly lower, ranging from about 7.1-7.3. Endosomes have a more acidic pH, in the range of 5.5-6.0, and lysosomes have an even more acidic pH at around 5.0. Some linkers will have a cleavable linking group that is cleaved at a suitable pH, thereby releasing a cationic lipid from the ligand inside the cell, or into the desired compartment of the cell.

[0426] A linker can include a cleavable linking group that is cleavable by a particular enzyme. The type of cleavable linking group incorporated into a linker can depend on the cell to be targeted.

[0427] In general, the suitability of a candidate cleavable linking group can be evaluated by testing the ability of a degradative agent (or condition) to cleave the candidate linking group. It will also be desirable to also test the candidate cleavable linking group for the ability to resist cleavage in the blood or when in contact with other non-target tissue. Thus, one can determine the relative susceptibility to cleavage between a first and a second condition, where the first is selected to be indicative of cleavage in a target cell and the second is selected to be indicative of cleavage in other tissues or biological fluids, e.g., blood or serum. The evaluations can be carried out in cell free systems, in cells, in cell culture, in organ or tissue culture, or in whole animals. It can be useful to make initial evaluations in cell-free or culture conditions and to confirm by further evaluations in whole animals. In some embodiments, useful candidate compounds are cleaved at least about 2, 4, 10, 20, 30, 40, 50, 60, 70, 80, 90, or about 100 times faster in the cell (or under in vitro conditions selected to mimic intracellular conditions) as compared to blood or serum (or under in vitro conditions selected to mimic extracellular conditions).

### Redox Cleavable Linking Groups

[0428] In some embodiments, a cleavable linking group is a redox cleavable linking group that is cleaved upon reduction or oxidation. An example of reductively cleavable linking group is a disulphide linking group (—S—S—). To determine if a candidate cleavable linking group is a suitable “reductively cleavable linking group,” or for example is suitable for use with a particular iRNA moiety and particular targeting agent one can look to methods described herein. For example, a candidate can be evaluated by incubation with dithiothreitol (DTT), or other reducing agent using reagents know in the art, which mimic the rate of cleavage which would be observed in a cell, e.g., a target cell. The candidates can also be evaluated under conditions which are selected to mimic blood or serum conditions. In one, candidate compounds are cleaved by at most about 10% in the blood. In other embodiments, useful candidate compounds are degraded at least about 2, 4, 10, 20, 30, 40, 50, 60, 70, 80, 90, or about 100 times faster in the cell (or under in vitro conditions selected to mimic intracellular conditions) as compared to blood (or under in vitro conditions selected to mimic extracellular conditions). The rate of cleavage of candidate compounds can be determined using standard enzyme kinetics assays under conditions chosen to mimic intracellular media and compared to conditions chosen to mimic extracellular media.

### Phosphate-Based Cleavable Linking Groups

[0429] In some embodiments, a cleavable linker comprises a phosphate-based cleavable linking group. A phosphate-based cleavable linking group is cleaved by agents that degrade or hydrolyze the phosphate group. An example of an agent that cleaves phosphate groups in cells are enzymes such as phosphatases in cells. Examples of phosphate-based linking groups are —OP(O)(ORk)—O—, —O—P(S)(ORk)—O—, —O—P(S)(SRk)—O—, —S—P(O)(ORk)—O—, —O—P(O)(ORk)—S—, —S—P(O)(ORk)—S—, —O—P(S)(ORk)—S—, —S—P(S)(ORk)—O—, —O—P(O)(Rk)—O—, —O—P(S)(Rk)—O—, —S—P(O)(Rk)—O—, —S—P(S)(Rk)—O—, —S—P(O)(Rk)—S—, —O—P(S)( Rk)—S—. In some embodiments, phosphate-based linking groups are —O—P(O)(OH)—O—, —O—P(S)(OH)—O—, —O—P(S)(SH)—O—, —S—P(O)(OH)—O—, —O—P(O)(OH)—S—, —S—P(O)(OH)—S—, —O—P(S)(OH)—S—, —S—P(S)(OH)—O—, —OP(O)(H)—O—, —O—P(S)(H)—O—, —S—P(O)(H)—O, —S—P(S)(H)—O—, —S—P(O)(H)—S—, —O—P(S)(H)—S—. In some embodiments, a phosphate-based linking group is —O—P(O)(OH)—O—. These candidates can be evaluated using methods analogous to those described above.

### Acid Cleavable Linking Groups

[0430] In some embodiments, a cleavable linker comprises an acid cleavable linking group. An acid cleavable linking group is a linking group that is cleaved under acidic conditions. In some embodiments acid cleavable linking groups are cleaved in an acidic environment with a pH of about 6.5 or lower (e.g., about 6.0, 5.75, 5.5, 5.25, 5.0, or lower), or by agents such as enzymes that can act as a general acid. In a cell, specific low pH organelles, such as endosomes and lysosomes can provide a cleaving environment for acid cleavable linking groups. Examples of acid cleavable linking groups include but are not limited to hydrazones, esters, and esters of amino acids. Acid cleavable groups can have the general formula —C═NN—, C(O)O, or —OC(O). In some embodiments, the carbon attached to the oxygen of the ester (the alkoxy group) is an aryl group, substituted alkyl group, or tertiary alkyl group such as dimethyl pentyl or t-butyl. These candidates can be evaluated using methods analogous to those described above.

### Ester-Based Cleavable Linking Groups

[0431] In some embodiments, a cleavable linker comprises an ester-based cleavable linking group. An ester-based cleavable linking group is cleaved by enzymes such as esterases and amidases in cells. Examples of ester-based cleavable linking groups include but are not limited to esters of alkylene, alkenylene and alkynylene groups. Ester cleavable linking groups have the general formula —C(O)O—, or —OC(O)—. These candidates can be evaluated using methods analogous to those described above.

### Peptide-Based Cleavable Linking Groups

[0432] In some embodiments, a cleavable linker comprises a peptide-based cleavable linking group. A peptide-based cleavable linking group is cleaved by enzymes such as peptidases and proteases in cells. Peptide-based cleavable linking groups are peptide bonds formed between amino acids to yield oligopeptides (e.g., dipeptides, tripeptides etc.) and polypeptides. Peptide-based cleavable groups do not include the amide group (—C(O)NH—). The amide group can be formed between any alkylene, alkenylene or alkynelene. A peptide bond is a special type of amide bond formed between amino acids to yield peptides and proteins. The peptide-based cleavage group is generally limited to the peptide bond (i.e., the amide bond) formed between amino acids yielding peptides and proteins and does not include the entire amide functional group. Peptide-based cleavable linking groups have the general formula —NHCHRAC(O)NHCHRBC(O)—, where RA and RB are the R groups of the two adjacent amino acids. These candidates can be evaluated using methods analogous to those described above. Representative U.S. Pats. that teach the preparation of RNA conjugates include, but are not limited to, U.S. Pat. Nos. 4,828,979; 4,948,882; 5,218,105; 5,525,465; 5,541,313; 5,545,730; 5,552,538; 5,578,717, 5,580,731; 5,591,584; 5,109,124; 5,118,802; 5,138,045; 5,414,077; 5,486,603; 5,512,439; 5,578,718; 5,608,046; 4,587,044; 4,605,735; 4,667,025; 4,762,779; 4,789,737; 4,824,941; 4,835,263; 4,876,335; 4,904,582; 4,958,013; 5,082,830; 5,112,963; 5,214,136; 5,082,830; 5,112,963; 5,214,136; 5,245,022; 5,254,469; 5,258,506; 5,262,536; 5,272,250; 5,292,873; 5,317,098; 5,371,241, 5,391,723; 5,416,203, 5,451,463; 5,510,475; 5,512,667; 5,514,785; 5,565,552; 5,567,810; 5,574,142; 5,585,481; 5,587,371; 5,595,726; 5,597,696; 5,599,923; 5,599,928 and 5,688,941; 6,294,664; 6,320,017; 6,576,752; 6,783,931; 6,900,297; 7,037,646; 8,106,022, the entire contents of each of which is herein incorporated by reference.

[0433] It is not necessary for all positions in a given compound to be uniformly modified, and in fact more than one of the aforementioned modifications may be incorporated in a single compound or even at a single nucleoside within an iRNA. The present disclosure also includes iRNA compounds that are chimeric compounds.

[0434] “Chimeric” iRNA compounds, or “chimeras,” in the context of the present disclosure, are iRNA compounds, e.g., dsRNAs, that contain two or more chemically distinct regions, each made up of at least one monomer unit, i.e., a nucleotide in the case of a dsRNA compound. These iRNAs typically contain at least one region wherein the RNA is modified so as to confer upon the iRNA increased resistance to nuclease degradation, increased cellular uptake, and/or increased binding affinity for the target nucleic acid. An additional region of the iRNA may serve as a substrate for enzymes capable of cleaving RNA:DNA or RNA:RNA hybrids. By way of example, RNase H is a cellular endonuclease which cleaves the RNA strand of an RNA:DNA duplex. Activation of RNase H, therefore, results in cleavage of the RNA target, thereby greatly enhancing the efficiency of iRNA inhibition of gene expression. Consequently, comparable results can often be obtained with shorter iRNAs when chimeric dsRNAs are used, compared to phosphorothioate deoxy dsRNAs hybridizing to the same target region. Cleavage of the RNA target can be routinely detected by gel electrophoresis and, if necessary, associated nucleic acid hybridization techniques known in the art.

[0435] In certain instances, the RNA of an iRNA can be modified by a non-ligand group. A number of non-ligand molecules have been conjugated to iRNAs in order to enhance the activity, cellular distribution or cellular uptake of the iRNA, and procedures for performing such conjugations are available in the scientific literature. Such non-ligand moieties have included lipid moieties, such as cholesterol (Kubo, T. et al., Biochem. Biophys. Res. Comm., 2007, 365(1):54-61; Letsinger et al., Proc. Natl. Acad. Sci. USA, 1989, 86:6553), cholic acid (Manoharan et al., Bioorg. Med. Chem. Lett., 1994, 4:1053), a thioether, e.g., hexyl-S-tritylthiol (Manoharan et al., Ann. N.Y. Acad. Sci., 1992, 660:306; Manoharan et al., Bioorg. Med. Chem. Let., 1993, 3:2765), a thiocholesterol (Oberhauser et al., Nucl. Acids Res., 1992, 20:533), an aliphatic chain, e.g., dodecandiol or undecyl residues (Saison-Behmoaras et al., EMBO J., 1991, 10:111; Kabanov et al., FEBS Lett., 1990, 259:327; Svinarchuk et al., Biochimie, 1993, 75:49), a phospholipid, e.g., di-hexadecyl-rac-glycerol or triethylammonium 1,2-di-O-hexadecyl-rac-glycero-3-H-phosphonate (Manoharan et al., Tetrahedron Lett., 1995, 36:3651; Shea et al., Nucl. Acids Res., 1990, 18:3777), a polyamine or a polyethylene glycol chain (Manoharan et al., Nucleosides & Nucleotides, 1995, 14:969), or adamantane acetic acid (Manoharan et al., Tetrahedron Lett., 1995, 36:3651), a palmityl moiety (Mishra et al., Biochim. Biophys. Acta, 1995, 1264:229), or an octadecylamine or hexylamino-carbonyl-oxycholesterol moiety (Crooke et al., J. Pharmacol. Exp. Ther., 1996, 277:923). Representative U.S. Pats. that teach the preparation of such RNA conjugates have been listed above. Typical conjugation protocols involve the synthesis of an RNAs bearing an aminolinker at one or more positions of the sequence. The amino group is then reacted with the molecule being conjugated using appropriate coupling or activating reagents. The conjugation reaction may be performed either with the RNA still bound to the solid support or following cleavage of the RNA, in solution phase. Purification of the RNA conjugate by HPLC typically affords the pure conjugate.

### Delivery of iRNA

[0436] The delivery of an iRNA to a subject in need thereof can be achieved in a number of different ways. In vivo delivery can be performed directly by administering a composition comprising an iRNA, e.g. a dsRNA, to a subject. Alternatively, delivery can be performed indirectly by administering one or more vectors that encode and direct the expression of the iRNA. These alternatives are discussed further below.

### Direct Delivery

[0437] In general, any method of delivering a nucleic acid molecule can be adapted for use with an iRNA (see e.g., Akhtar S. and Julian RL. (1992) Trends Cell. Biol. 2(5):139-144 and WO94/02595, which are incorporated herein by reference in their entireties). However, there are three factors that are important to consider in order to successfully deliver an iRNA molecule in vivo: (a) biological stability of the delivered molecule, (2) preventing non-specific effects, and (3) accumulation of the delivered molecule in the target tissue. The non-specific effects of an iRNA can be minimized by local administration, for example by direct injection or implantation into a tissue (as a non-limiting example, the eye) or topically administering the preparation. Local administration to a treatment site maximizes local concentration of the agent, limits the exposure of the agent to systemic tissues that may otherwise be harmed by the agent or that may degrade the agent, and permits a lower total dose of the iRNA molecule to be administered. Several studies have shown successful knockdown of gene products when an iRNA is administered locally. For example, intraocular delivery of a VEGF dsRNA by intravitreal injection in cynomolgus monkeys (Tolentino, MJ., et al (2004) Retina 24:132-138) and subretinal injections in mice (Reich, SJ., et al (2003) Mol. Vis. 9:210-216) were both shown to prevent neovascularization in an experimental model of age-related macular degeneration. In addition, direct intratumoral injection of a dsRNA in mice reduces tumor volume (Pille, J., et al (2005) Mol. Ther. 11:267-274) and can prolong survival of tumor-bearing mice (Kim, WJ., et al (2006) Mol. Ther. 14:343-350; Li, S., et al (2007) Mol. Ther. 15:515-523). RNA interference has also shown success with local delivery to the CNS by direct injection (Dorn, G., et al. (2004) Nucleic Acids 32:e49; Tan, PH., et al (2005) Gene Ther. 12:59-66; Makimura, H., et al (2002) BMC Neurosci. 3:18; Shishkina, GT., et al (2004) Neuroscience 129:521-528; Thakker, ER., et al (2004) Proc. Natl. Acad. Sci. U.S.A. 101:17270-17275; Akaneya,Y., et al (2005) J. Neurophysiol. 93:594-602) and to the lungs by intranasal administration (Howard, KA., et al (2006) Mol. Ther. 14:476-484; Zhang, X., et al (2004) J. Biol. Chem. 279:10677-10684; Bitko, V., et al (2005) Nat. Med. 11:50-55). For administering an iRNA systemically for the treatment of a disease, the RNA can be modified or alternatively delivered using a drug delivery system; both methods act to prevent the rapid degradation of the dsRNA by endo- and exo-nucleases in vivo.

[0438] Modification of the RNA or the pharmaceutical carrier can also permit targeting of the iRNA composition to the target tissue and avoid undesirable off-target effects. iRNA molecules can be modified by chemical conjugation to other groups, e.g., a lipid or carbohydrate group as described herein. Such conjugates can be used to target iRNA to particular cells, e.g., liver cells, e.g., hepatocytes. For example, GalNAc conjugates or lipid (e.g., LNP) formulations can be used to target iRNA to particular cells, e.g., liver cells, e.g., hepatocytes.

[0439] iRNA molecules can also be modified by chemical conjugation to lipophilic groups such as cholesterol to enhance cellular uptake and prevent degradation. For example, an iRNA directed against ApoB conjugated to a lipophilic cholesterol moiety was injected systemically into mice and resulted in knockdown of apoB mRNA in both the liver and jejunum (Soutschek, J., et al (2004) Nature 432:173-178). Conjugation of an iRNA to an aptamer has been shown to inhibit tumor growth and mediate tumor regression in a mouse model of prostate cancer (McNamara, JO., et al (2006) Nat. Biotechnol. 24:1005-1015). In an alternative embodiment, the iRNA can be delivered using drug delivery systems such as a nanoparticle, a dendrimer, a polymer, liposomes, or a cationic delivery system. Positively charged cationic delivery systems facilitate binding of an iRNA molecule (negatively charged) and also enhance interactions at the negatively charged cell membrane to permit efficient uptake of an iRNA by the cell. Cationic lipids, dendrimers, or polymers can either be bound to an iRNA, or induced to form a vesicle or micelle (see e.g., Kim SH., et al (2008) Journal of Controlled Release 129(2): 107-116) that encases an iRNA. The formation of vesicles or micelles further prevents degradation of the iRNA when administered systemically. Methods for making and administering cationic- iRNA complexes are well within the abilities of one skilled in the art (see e.g., Sorensen, DR., et al (2003) J. Mol. Biol 327:761-766; Verma, UN., et al (2003) Clin. Cancer Res. 9:1291-1300; Arnold, AS et al (2007) J. Hypertens. 25:197-205, which are incorporated herein by reference in their entirety). Some non-limiting examples of drug delivery systems useful for systemic delivery of iRNAs include DOTAP (Sorensen, DR., et al (2003), supra; Verma, UN., et al (2003), supra), Oligofectamine, “solid nucleic acid lipid particles” (Zimmermann, TS., et al (2006) Nature 441:111-114), cardiolipin (Chien, PY., et al (2005) Cancer Gene Ther. 12:321-328; Pal, A., et al (2005) Int J. Oncol. 26:1087-1091), polyethyleneimine (Bonnet ME., et al (2008) Pharm. Res. Aug 16 Epub ahead of print; Aigner, A. (2006) J. Biomed. Biotechnol. 71659), Arg-Gly-Asp (RGD) peptides (Liu, S. (2006) Mol. Pharm. 3:472-487), and polyamidoamines (Tomalia, DA., et al (2007) Biochem. Soc. Trans. 35:61-67; Yoo, H., et al (1999) Pharm. Res. 16:1799-1804). In some embodiments, an iRNA forms a complex with cyclodextrin for systemic administration. Methods for administration and pharmaceutical compositions of iRNAs and cyclodextrins can be found in U.S. Pat. No. 7,427,605, which is herein incorporated by reference in its entirety.

### Vector Encoded iRNAs

[0440] In another aspect, iRNA targeting MYOC can be expressed from transcription units inserted into DNA or RNA vectors (see, e.g., Couture, A, et al., TIG. (1996), 12:5-10; Skillern, A., et al., International PCT Publication No. WO 00/22113, Conrad, International PCT Publication No. WO 00/22114, and Conrad, U.S. Pat. No. 6,054,299). Expression can be transient (on the order of hours to weeks) or sustained (weeks to months or longer), depending upon the specific construct used and the target tissue or cell type. These transgenes can be introduced as a linear construct, a circular plasmid, or a viral vector, which can be an integrating or non-integrating vector. The transgene can also be constructed to permit it to be inherited as an extrachromosomal plasmid (Gassmann, et al., Proc. Natl. Acad. Sci. USA (1995) 92:1292).

[0441] The individual strand or strands of an iRNA can be transcribed from a promoter on an expression vector. Where two separate strands are to be expressed to generate, for example, a dsRNA, two separate expression vectors can be co-introduced (e.g., by transfection or infection) into a target cell. Alternatively, each individual strand of a dsRNA can be transcribed by promoters both of which are located on the same expression plasmid. In some embodiments, a dsRNA is expressed as an inverted repeat joined by a linker polynucleotide sequence such that the dsRNA has a stem and loop structure.

[0442] An iRNA expression vector is typically a DNA plasmid or viral vector. An expression vector compatible with eukaryotic cells, e.g., with vertebrate cells, can be used to produce recombinant constructs for the expression of an iRNA as described herein. Eukaryotic cell expression vectors are well known in the art and are available from a number of commercial sources. Typically, such vectors contain convenient restriction sites for insertion of the desired nucleic acid segment. Delivery of iRNA expressing vectors can be systemic, such as by intravenous or intramuscular administration, by administration to target cells ex-planted from the patient followed by reintroduction into the patient, or by any other means that allows for introduction into a desired target cell.

[0443] An iRNA expression plasmid can be transfected into a target cell as a complex with a cationic lipid carrier (e.g., Oligofectamine) or a non-cationic lipid-based carrier (e.g., Transit-TKO™). Multiple lipid transfections for iRNA-mediated knockdowns targeting different regions of a target RNA over a period of a week or more are also contemplated by the disclosure. Successful introduction of vectors into host cells can be monitored using various known methods. For example, transient transfection can be signaled with a reporter, such as a fluorescent marker, such as Green Fluorescent Protein (GFP). Stable transfection of cells ex vivo can be ensured using markers that provide the transfected cell with resistance to specific environmental factors (e.g., antibiotics and drugs), such as hygromycin B resistance.

[0444] Viral vector systems which can be utilized with the methods and compositions described herein include, but are not limited to, (a) adenovirus vectors; (b) retrovirus vectors, including but not limited to lentiviral vectors, moloney murine leukemia virus, etc.; (c) adeno- associated virus vectors; (d) herpes simplex virus vectors; (e) SV40 vectors; (f) polyoma virus vectors; (g) papilloma virus vectors; (h) picornavirus vectors; (i) pox virus vectors such as an orthopox, e.g., vaccinia virus vectors or avipox, e.g. canary pox or fowl pox; and (j) a helper-dependent or gutless adenovirus. Replication-defective viruses can also be advantageous. Different vectors will or will not become incorporated into the cells’ genome. The constructs can include viral sequences for transfection, if desired. Alternatively, the construct may be incorporated into vectors capable of episomal replication, e.g EPV and EBV vectors. Constructs for the recombinant expression of an iRNA will generally require regulatory elements, e.g., promoters, enhancers, etc., to ensure the expression of the iRNA in target cells. Other aspects to consider for vectors and constructs are further described below.

[0445] Vectors useful for the delivery of an iRNA will include regulatory elements (promoter, enhancer, etc.) sufficient for expression of the iRNA in the desired target cell or tissue. The regulatory elements can be chosen to provide either constitutive or regulated/inducible expression.

[0446] Expression of the iRNA can be precisely regulated, for example, by using an inducible regulatory sequence that is sensitive to certain physiological regulators, e.g., circulating glucose levels, or hormones (Docherty et al., 1994, FASEB J. 8:20-24). Such inducible expression systems, suitable for the control of dsRNA expression in cells or in mammals include, for example, regulation by ecdysone, by estrogen, progesterone, tetracycline, chemical inducers of dimerization, and isopropyl-β-D1-thiogalactopyranoside (IPTG). A person skilled in the art would be able to choose the appropriate regulatory/promoter sequence based on the intended use of the iRNA transgene.

[0447] In a specific embodiment, viral vectors that contain nucleic acid sequences encoding an iRNA can be used. For example, a retroviral vector can be used (see Miller et al., Meth. Enzymol. 217:581-599 (1993)). These retroviral vectors contain the components necessary for the correct packaging of the viral genome and integration into the host cell DNA. The nucleic acid sequences encoding an iRNA are cloned into one or more vectors, which facilitates delivery of the nucleic acid into a patient. More detail about retroviral vectors can be found, for example, in Boesen et al., Biotherapy 6:291-302 (1994), which describes the use of a retroviral vector to deliver the mdr1 gene to hematopoietic stem cells in order to make the stem cells more resistant to chemotherapy. Other references illustrating the use of retroviral vectors in gene therapy are: Clowes et al., J. Clin. Invest. 93:644-651 (1994); Kiem et al., Blood 83:1467-1473 (1994); Salmons and Gunzberg, Human Gene Therapy 4:129-141 (1993); and Grossman and Wilson, Curr. Opin. in Genetics and Devel. 3:110-114 (1993). Lentiviral vectors contemplated for use include, for example, the HIV based vectors described in U.S. Pat. Nos. 6,143,520; 5,665,557; and 5,981,276, which are herein incorporated by reference.

[0448] Adenoviruses are also contemplated for use in delivery of iRNAs. Adenoviruses are especially attractive vehicles, e.g., for delivering genes to respiratory epithelia. Adenoviruses naturally infect respiratory epithelia where they cause a mild disease. Other targets for adenovirus-based delivery systems are liver, the central nervous system, endothelial cells, and muscle. Adenoviruses have the advantage of being capable of infecting non-dividing cells. Kozarsky and Wilson, Current Opinion in Genetics and Development 3:499-503 (1993) present a review of adenovirus-based gene therapy. Bout et al., Human Gene Therapy 5:3-10 (1994) demonstrated the use of adenovirus vectors to transfer genes to the respiratory epithelia of rhesus monkeys. Other instances of the use of adenoviruses in gene therapy can be found in Rosenfeld et al., Science 252:431-434 (1991); Rosenfeld et al., Cell 68:143-155 (1992); Mastrangeli et al., J. Clin. Invest. 91:225-234 (1993); PCT Publication WO94/12649; and Wang, et al., Gene Therapy 2:775-783 (1995). A suitable AV vector for expressing an iRNA featured in the disclosure, a method for constructing the recombinant AV vector, and a method for delivering the vector into target cells, are described in Xia H et al. (2002), Nat. Biotech. 20: 1006-1010.

[0449] Use of Adeno-associated virus (AAV) vectors is also contemplated (Walsh et al., Proc. Soc. Exp. Biol. Med. 204:289-300 (1993); U.S. Pat. No. 5,436,146). In some embodiments, the iRNA can be expressed as two separate, complementary single-stranded RNA molecules from a recombinant AAV vector having, for example, either the U6 or H1 RNA promoters, or the cytomegalovirus (CMV) promoter. Suitable AAV vectors for expressing the dsRNA featured in the disclosure, methods for constructing the recombinant AV vector, and methods for delivering the vectors into target cells are described in Samulski R et al. (1987), J. Virol. 61: 3096-3101; Fisher K J et al. (1996), J. Virol., 70: 520-532; Samulski R et al. (1989), J. Virol. 63: 3822-3826; U.S. Pat. No. 5,252,479; U.S. Pat. No. 5,139,941; International Patent Application No. WO 94/13788; and International Patent Application No. WO 93/24641, the entire disclosures of which are herein incorporated by reference.

[0450] Another typical viral vector is a pox virus such as a vaccinia virus, for example an attenuated vaccinia such as Modified Virus Ankara (MVA) or NYVAC, an avipox such as fowl pox or canary pox.

[0451] The tropism of viral vectors can be modified by pseudotyping the vectors with envelope proteins or other surface antigens from other viruses, or by substituting different viral capsid proteins, as appropriate. For example, lentiviral vectors can be pseudotyped with surface proteins from vesicular stomatitis virus (VSV), rabies, Ebola, Mokola, and the like. AAV vectors can be made to target different cells by engineering the vectors to express different capsid protein serotypes; see, e.g., Rabinowitz J E et al. (2002), J Virol 76:791-801, the entire disclosure of which is herein incorporated by reference.

[0452] The pharmaceutical preparation of a vector can include the vector in an acceptable diluent, or can include a slow release matrix in which the gene delivery vehicle is imbedded. Alternatively, where the complete gene delivery vector can be produced intact from recombinant cells, e.g., retroviral vectors, the pharmaceutical preparation can include one or more cells which produce the gene delivery system.

### III. Pharmaceutical Compositions Containing iRNA

[0453] In some embodiments, the disclosure provides pharmaceutical compositions containing an iRNA, as described herein, and a pharmaceutically acceptable carrier. The pharmaceutical composition containing the iRNA is useful for treating a disease or disorder related to the expression or activity of MYOC (e.g., glaucoma, e.g., primary open angle glaucoma (POAG)). Such pharmaceutical compositions are formulated based on the mode of delivery. In some embodiments, compositions can be formulated for localized delivery, e.g., by intraocular delivery (e.g., intravitreal administration, e.g., intravitreal injection; transscleral administration, e.g., transscleral injection; subconjunctival administration, e.g., subconjunctival injection; retrobulbar administration, e.g., retrobulbar injection; intracameral administration, e.g., intracameral injection; or subretinal administration, e.g., subretinal injection). In other embodiments, compositions can be formulated for topical delivery. In another example, compositions can be formulated for systemic administration via parenteral delivery, e.g., by intravenous (IV) delivery. In some embodiments, a composition provided herein (e.g., a composition comprising a GalNAc conjugate or an LNP formulation) is formulated for intravenous delivery.

[0454] The pharmaceutical compositions featured herein are administered in a dosage sufficient to inhibit expression of MYOC. In general, a suitable dose of iRNA will be in the range of 0.01 to 200.0 milligrams per kilogram body weight of the recipient per day. The pharmaceutical composition may be administered once daily, or the iRNA may be administered as two, three, or more sub-doses at appropriate intervals throughout the day or even using continuous infusion or delivery through a controlled release formulation. In that case, the iRNA contained in each sub-dose must be correspondingly smaller in order to achieve the total daily dosage. The dosage unit can also be compounded for delivery over several days, e.g., using a conventional sustained release formulation which provides sustained release of the iRNA over a several day period. Sustained release formulations are well known in the art and are particularly useful for delivery of agents at a particular site, such as can be used with the agents of the present disclosure. In this embodiment, the dosage unit contains a corresponding multiple of the daily dose.

[0455] The effect of a single dose on MYOC levels can be long lasting, such that subsequent doses are administered at not more than 3, 4, or 5-day intervals, or at not more than 1, 2, 3, 4, 12, 24, or 36-week intervals.

[0456] The skilled artisan will appreciate that certain factors may influence the dosage and timing required to effectively treat a subject, including but not limited to the severity of the disease or disorder, previous treatments, the general health and/or age of the subject, and other diseases present. Moreover, treatment of a subject with a therapeutically effective amount of a composition can include a single treatment or a series of treatments. Estimates of effective dosages and in vivo half-lives for the individual iRNAs encompassed by the disclosure can be made using conventional methodologies or on the basis of in vivo testing using a suitable animal model.

[0457] A suitable animal model, e.g., a mouse or a cynomolgus monkey, e.g., an animal containing a transgene expressing human MYOC, can be used to determine the therapeutically effective dose and/or an effective dosage regimen administration of MYOC siRNA.

[0458] The present disclosure also includes pharmaceutical compositions and formulations that include the iRNA compounds featured herein. The pharmaceutical compositions of the present disclosure may be administered in a number of ways depending upon whether local or systemic treatment is desired and upon the area to be treated. Administration may be local (e.g., by intraocular injection), topical (e.g., by an eye drop solution), or parenteral. Parenteral administration includes intravenous, intraarterial, subcutaneous, intraperitoneal or intramuscular injection or infusion; subdermal, e.g., via an implanted device; or intracranial, e.g., by intraparenchymal, intrathecal, or intraventricular administration.

[0459] Pharmaceutical compositions and formulations for topical administration may include transdermal patches, ointments, lotions, creams, gels, drops, suppositories, sprays, liquids and powders. Conventional pharmaceutical carriers, aqueous, powder or oily bases, thickeners and the like may be necessary or desirable. Coated condoms, gloves and the like may also be useful. Suitable topical formulations include those in which the iRNAs featured in the disclosure are in admixture with a topical delivery agent such as lipids, liposomes, fatty acids, fatty acid esters, steroids, chelating agents and surfactants. Suitable lipids and liposomes include neutral (e.g., dioleoylphosphatidyl DOPE ethanolamine, dimyristoylphosphatidyl choline DMPC, distearolyphosphatidyl choline) negative (e.g., dimyristoylphosphatidyl glycerol DMPG) and cationic (e.g., dioleoyltetramethylaminopropyl DOTAP and dioleoylphosphatidyl ethanolamine DOTMA). iRNAs featured in the disclosure may be encapsulated within liposomes or may form complexes thereto, in particular to cationic liposomes. Alternatively, iRNAs may be complexed to lipids, in particular to cationic lipids. Suitable fatty acids and esters include but are not limited to arachidonic acid, oleic acid, eicosanoic acid, lauric acid, caprylic acid, capric acid, myristic acid, palmitic acid, stearic acid, linoleic acid, linolenic acid, dicaprate, tricaprate, monoolein, dilaurin, glyceryl 1-monocaprate, 1-dodecylazacycloheptan-2-one, an acylcarnitine, an acylcholine, or a C₁₋₂₀ alkyl ester (e.g., isopropylmyristate IPM), monoglyceride, diglyceride or pharmaceutically acceptable salt thereof. Topical formulations are described in detail in U.S. Pat. No. 6,747,014, which is incorporated herein by reference.

### Liposomal Formulations

[0460] There are many organized surfactant structures besides microemulsions that have been studied and used for the formulation of drugs. These include monolayers, micelles, bilayers and vesicles. Vesicles, such as liposomes, have attracted great interest because of their specificity and the duration of action they offer from the standpoint of drug delivery. As used in the present disclosure, the term “liposome” means a vesicle composed of amphiphilic lipids arranged in a spherical bilayer or bilayers.

[0461] Liposomes are unilamellar or multilamellar vesicles which have a membrane formed from a lipophilic material and an aqueous interior. The aqueous portion contains the composition to be delivered. Cationic liposomes possess the advantage of being able to fuse to the cell wall. Non-cationic liposomes, although not able to fuse as efficiently with the cell wall, are taken up by macrophages in vivo.

[0462] In order to traverse intact mammalian skin, lipid vesicles must pass through a series of fine pores, each with a diameter less than 50 nm, under the influence of a suitable transdermal gradient. Therefore, it is desirable to use a liposome which is highly deformable and able to pass through such fine pores.

[0463] Further advantages of liposomes include; liposomes obtained from natural phospholipids are biocompatible and biodegradable; liposomes can incorporate a wide range of water and lipid soluble drugs; liposomes can protect encapsulated drugs in their internal compartments from metabolism and degradation (Rosoff, in Pharmaceutical Dosage Forms, Lieberman, Rieger and Banker (Eds.), 1988, Marcel Dekker, Inc., New York, N.Y., volume 1, p. 245). Important considerations in the preparation of liposome formulations are the lipid surface charge, vesicle size and the aqueous volume of the liposomes.

[0464] Liposomes are useful for the transfer and delivery of active ingredients to the site of action. Because the liposomal membrane is structurally similar to biological membranes, when liposomes are applied to a tissue, the liposomes start to merge with the cellular membranes and as the merging of the liposome and cell progresses, the liposomal contents are emptied into the cell where the active agent may act.

[0465] Liposomal formulations have been the focus of extensive investigation as the mode of delivery for many drugs. There is growing evidence that for topical administration, liposomes present several advantages over other formulations. Such advantages include reduced side-effects related to high systemic absorption of the administered drug, increased accumulation of the administered drug at the desired target, and the ability to administer a wide variety of drugs, both hydrophilic and hydrophobic, into the skin.

[0466] Several reports have detailed the ability of liposomes to deliver agents including high-molecular weight DNA into the skin. Compounds including analgesics, antibodies, hormones and high-molecular weight DNAs have been administered to the skin. The majority of applications resulted in the targeting of the upper epidermis

[0467] Liposomes fall into two broad classes. Cationic liposomes are positively charged liposomes which interact with the negatively charged DNA molecules to form a stable complex. The positively charged DNA/liposome complex binds to the negatively charged cell surface and is internalized in an endosome. Due to the acidic pH within the endosome, the liposomes are ruptured, releasing their contents into the cell cytoplasm (Wang et al., Biochem. Biophys. Res. Commun., 1987, 147, 980-985).

[0468] Liposomes which are pH-sensitive or negatively charged, entrap DNA rather than complex with it. Since both the DNA and the lipid are similarly charged, repulsion rather than complex formation occurs. Nevertheless, some DNA is entrapped within the aqueous interior of these liposomes. pH-sensitive liposomes have been used to deliver DNA encoding the thymidine kinase gene to cell monolayers in culture. Expression of the exogenous gene was detected in the target cells (Zhou et al., Journal of Controlled Release, 1992, 19, 269-274).

[0469] One major type of liposomal composition includes phospholipids other than naturally derived phosphatidylcholine. Neutral liposome compositions, for example, can be formed from dimyristoyl phosphatidylcholine (DMPC) or dipalmitoyl phosphatidylcholine (DPPC). Anionic liposome compositions generally are formed from dimyristoyl phosphatidylglycerol, while anionic fusogenic liposomes are formed primarily from dioleoyl phosphatidylethanolamine (DOPE). Another type of liposomal composition is formed from phosphatidylcholine (PC) such as, for example, soybean PC, and egg PC. Another type is formed from mixtures of phospholipid and/or phosphatidylcholine and/or cholesterol.

[0470] Several studies have assessed the topical delivery of liposomal drug formulations to the skin. Application of liposomes containing interferon to guinea pig skin resulted in a reduction of skin herpes sores while delivery of interferon via other means (e.g., as a solution or as an emulsion) were ineffective (Weiner et al., Journal of Drug Targeting, 1992, 2, 405-410). Further, an additional study tested the efficacy of interferon administered as part of a liposomal formulation to the administration of interferon using an aqueous system, and concluded that the liposomal formulation was superior to aqueous administration (du Plessis et al., Antiviral Research, 1992, 18, 259-265).

[0471] Non-ionic liposomal systems have also been examined to determine their utility in the delivery of drugs to the skin, in particular systems comprising non-ionic surfactant and cholesterol. Non-ionic liposomal formulations comprising Novasome™ I (glyceryl dilaurate/cholesterol/polyoxyethylene-10-stearyl ether) and Novasome™ II (glyceryl distearate/cholesterol/polyoxyethylene-10-stearyl ether) were used to deliver cyclosporin-A into the dermis of mouse skin. Results indicated that such non-ionic liposomal systems were effective in facilitating the deposition of cyclosporin-A into different layers of the skin (Hu et al. S.T.P. Pharma. Sci., 1994, 4, 6, 466).

[0472] Liposomes also include “sterically stabilized” liposomes, a term which, as used herein, refers to liposomes comprising one or more specialized lipids that, when incorporated into liposomes, result in enhanced circulation lifetimes relative to liposomes lacking such specialized lipids. Examples of sterically stabilized liposomes are those in which part of the vesicle-forming lipid portion of the liposome (A) comprises one or more glycolipids, such as monosialoganglioside G_{M1}, or (B) is derivatized with one or more hydrophilic polymers, such as a polyethylene glycol (PEG) moiety. While not wishing to be bound by any particular theory, it is thought in the art that, at least for sterically stabilized liposomes containing gangliosides, sphingomyelin, or PEG-derivatized lipids, the enhanced circulation half-life of these sterically stabilized liposomes derives from a reduced uptake into cells of the reticuloendothelial system (RES) (Allen et al., FEBS Letters, 1987, 223, 42; Wu et al., Cancer Research, 1993, 53, 3765).

[0473] Various liposomes comprising one or more glycolipids are known in the art. Papahadjopoulos et al. (Ann. N.Y. Acad. Sci., 1987, 507, 64) reported the ability of monosialoganglioside G_{M1}, galactocerebroside sulfate and phosphatidylinositol to improve blood half-lives of liposomes. These findings were expounded upon by Gabizon et al. (Proc. Natl. Acad. Sci. U.S.A., 1988, 85, 6949). U.S. Pat. No. 4,837,028 and WO 88/04924, both to Allen et al., disclose liposomes comprising (1) sphingomyelin and (2) the ganglioside G_{M1} or a galactocerebroside sulfate ester. U.S. Pat. No. 5,543,152 (Webb et al.) discloses liposomes comprising sphingomyelin. Liposomes comprising 1,2-sn-dimyristoylphosphatidylcholine are disclosed in WO 97/13499 (Lim et al).

[0474] Many liposomes comprising lipids derivatized with one or more hydrophilic polymers, and methods of preparation thereof, are known in the art. Sunamoto et al. (Bull. Chem. Soc. Jpn., 1980, 53, 2778) described liposomes comprising a nonionic detergent, 2C_{1215G}, that contains a PEG moiety. Illum et al. (FEBS Lett., 1984, 167, 79) noted that hydrophilic coating of polystyrene particles with polymeric glycols results in significantly enhanced blood half-lives. Synthetic phospholipids modified by the attachment of carboxylic groups of polyalkylene glycols (e.g., PEG) are described by Sears (U.S. Pat. Nos. 4,426,330 and 4,534,899). Klibanov et al. (FEBS Lett., 1990, 268, 235) described experiments demonstrating that liposomes comprising phosphatidylethanolamine (PE) derivatized with PEG or PEG stearate have significant increases in blood circulation half-lives. Blume et al. (Biochimica et Biophysica Acta, 1990, 1029, 91) extended such observations to other PEG-derivatized phospholipids, e.g., DSPE-PEG, formed from the combination of distearoylphosphatidylethanolamine (DSPE) and PEG. Liposomes having covalently bound PEG moieties on their external surface are described in European Patent No. EP 0 445 131 B1 and WO 90/04384 to Fisher. Liposome compositions containing 1-20 mole percent of PE derivatized with PEG, and methods of use thereof, are described by Woodle et al. (U.S. Pat. Nos. 5,013,556 and 5,356,633) and Martin et al. (U.S. Pat. No. 5,213,804 and European Patent No. EP 0 496 813 B 1). Liposomes comprising a number of other lipid-polymer conjugates are disclosed in WO 91/05545 and U.S. Pat. No. 5,225,212 (both to Martin et al.) and in WO 94/20073 (Zalipsky et al.). Liposomes comprising PEG-modified ceramide lipids are described in WO 96/10391 (Choi et al). U.S. Pat. No. 5,540,935 (Miyazaki et al.) and U.S. Pat. No. 5,556,948 (Tagawa et al.) describe PEG-containing liposomes that can be further derivatized with functional moieties on their surfaces.

[0475] A number of liposomes comprising nucleic acids are known in the art. WO 96/40062 to Thierry et al. discloses methods for encapsulating high molecular weight nucleic acids in liposomes. U.S. Pat. No. 5,264,221 to Tagawa et al. discloses protein-bonded liposomes and asserts that the contents of such liposomes may include a dsRNA. U.S. Pat. No. 5,665,710 to Rahman et al. describes certain methods of encapsulating oligodeoxynucleotides in liposomes. WO 97/04787 to Love et al. discloses liposomes comprising dsRNAs targeted to the raf gene.

[0476] Transfersomes are yet another type of liposomes, and are highly deformable lipid aggregates which are attractive candidates for drug delivery vehicles. Transfersomes may be described as lipid droplets which are so highly deformable that they are easily able to penetrate through pores which are smaller than the droplet. Transfersomes are adaptable to the environment in which they are used, e.g., they are self-optimizing (adaptive to the shape of pores in the skin), self-repairing, frequently reach their targets without fragmenting, and often self-loading. To make transfersomes it is possible to add surface edge-activators, usually surfactants, to a standard liposomal composition. Transfersomes have been used to deliver serum albumin to the skin. The transfersome-mediated delivery of serum albumin has been shown to be as effective as subcutaneous injection of a solution containing serum albumin.

[0477] Surfactants find wide application in formulations such as emulsions (including microemulsions) and liposomes. The most common way of classifying and ranking the properties of the many different types of surfactants, both natural and synthetic, is by the use of the hydrophile/lipophile balance (HLB). The nature of the hydrophilic group (also known as the “head”) provides the most useful means for categorizing the different surfactants used in formulations (Rieger, in Pharmaceutical Dosage Forms, Marcel Dekker, Inc., New York, N.Y., 1988, p. 285).

[0478] If the surfactant molecule is not ionized, it is classified as a nonionic surfactant. Nonionic surfactants find wide application in pharmaceutical and cosmetic products and are usable over a wide range of pH values. In general, their HLB values range from 2 to about 18 depending on their structure. Nonionic surfactants include nonionic esters such as ethylene glycol esters, propylene glycol esters, glyceryl esters, polyglyceryl esters, sorbitan esters, sucrose esters, and ethoxylated esters. Nonionic alkanolamides and ethers such as fatty alcohol ethoxylates, propoxylated alcohols, and ethoxylated/propoxylated block polymers are also included in this class. The polyoxyethylene surfactants are the most popular members of the nonionic surfactant class.

[0479] If the surfactant molecule carries a negative charge when it is dissolved or dispersed in water, the surfactant is classified as anionic. Anionic surfactants include carboxylates such as soaps, acyl lactylates, acyl amides of amino acids, esters of sulfuric acid such as alkyl sulfates and ethoxylated alkyl sulfates, sulfonates such as alkyl benzene sulfonates, acyl isethionates, acyl taurates and sulfosuccinates, and phosphates. The most important members of the anionic surfactant class are the alkyl sulfates and the soaps.

[0480] If the surfactant molecule carries a positive charge when it is dissolved or dispersed in water, the surfactant is classified as cationic. Cationic surfactants include quaternary ammonium salts and ethoxylated amines. The quaternary ammonium salts are the most used members of this class.

[0481] If the surfactant molecule has the ability to carry either a positive or negative charge, the surfactant is classified as amphoteric. Amphoteric surfactants include acrylic acid derivatives, substituted alkylamides, N-alkylbetaines and phosphatides.

[0482] The use of surfactants in drug products, formulations and in emulsions has been reviewed (Rieger, in Pharmaceutical Dosage Forms, Marcel Dekker, Inc., New York, N.Y., 1988, p. 285).

### Nucleic Acid Lipid Particles

[0483] In some embodiments, a MYOC dsRNA featured in the disclosure is fully encapsulated in the lipid formulation, e.g., to form a SPLP, pSPLP, SNALP, or other nucleic acid-lipid particle. SNALPs and SPLPs typically contain a cationic lipid, a non-cationic lipid, and a lipid that prevents aggregation of the particle (e.g., a PEG-lipid conjugate). SNALPs and SPLPs are extremely useful for systemic applications, as they exhibit extended circulation lifetimes following intravenous (i.v.) injection and accumulate at distal sites (e.g., sites physically separated from the administration site). SPLPs include “pSPLP,” which include an encapsulated condensing agent-nucleic acid complex as set forth in PCT Publication No. WO 00/03683. The particles of the present disclosure typically have a mean diameter of about 50 nm to about 150 nm, more typically about 60 nm to about 130 nm, more typically about 70 nm to about 110 nm, most typically about 70 nm to about 90 nm, and are substantially nontoxic. In addition, the nucleic acids when present in the nucleic acid- lipid particles of the present disclosure are resistant in aqueous solution to degradation with a nuclease. Nucleic acid-lipid particles and their method of preparation are disclosed in, e.g., U.S. Pat. Nos. 5,976,567; 5,981,501; 6,534,484; 6,586,410; 6,815,432; and PCT Publication No. WO 96/40964.

[0484] In some embodiments, the lipid to drug ratio (mass/mass ratio) (e.g., lipid to dsRNA ratio) will be in the range of from about 1:1 to about 50:1, from about 1:1 to about 25:1, from about 3:1 to about 15:1, from about 4:1 to about 10:1, from about 5:1 to about 9:1, or about 6:1 to about 9:1.

[0485] The cationic lipid may be, for example, N,N-dioleyl-N,N-dimethylammonium chloride (DODAC), N,N-distearyl-N,N-dimethylammonium bromide (DDAB), N-(I -(2,3-dioleoyloxy)propyl)-N,N,N-trimethylammonium chloride (DOTAP), N-(I -(2,3-dioleyloxy)propyl)-N,N,N-trimethylammonium chloride (DOTMA), N,N-dimethyl-2,3-dioleyloxy)propylamine (DODMA), 1,2-DiLinoleyloxy-N,N-dimethylaminopropane (DLinDMA), 1,2-Dilinolenyloxy-N,N-dimethylaminopropane (DLenDMA), 1,2-Dilinoleylcarbamoyloxy-3-dimethylaminopropane (DLin-C-DAP), 1,2-Dilinoleyoxy-3-(dimethylamino)acetoxypropane (DLin-DAC), 1,2-Dilinoleyoxy-3-morpholinopropane (DLin-MA), 1,2-Dilinoleoyl-3-dimethylaminopropane (DLinDAP), 1,2-Dilinoleylthio-3-dimethylaminopropane (DLin-S-DMA), 1-Linoleoyl-2-linoleyloxy-3-dimethylaminopropane (DLin-2-DMAP), 1,2-Dilinoleyloxy-3-trimethylaminopropane chloride salt (DLin-TMA.Cl), 1,2-Dilinoleoyl-3-trimethylaminopropane chloride salt (DLin-TAP.Cl), 1,2-Dilinoleyloxy-3-(N-methylpiperazino)propane (DLin-MPZ), or 3-(N,N-Dilinoleylamino)-1,2-propanediol (DLinAP), 3-(N,N-Dioleylamino)-1,2-propanedio (DOAP), 1,2-Dilinoleyloxo-3-(2-N,N-dimethylamino)ethoxypropane (DLin-EG-DMA), 1,2-Dilinolenyloxy-N,N-dimethylaminopropane (DLinDMA), 2,2-Dilinoleyl-4-dimethylaminomethyl-[1,3]-dioxolane (DLin-K-DMA) or analogs thereof, (3aR,5s,6aS)-N,N-dimethyl-2,2-di((9Z,12Z)-octadeca-9,12-dienyl)tetrahydro-3aH-cyclopenta[d][1,3]dioxol-5-amine (ALN100), (6Z,9Z,28Z,31Z)-heptatriaconta-6,9,28,31-tetraen-19-yl 4-(dimethylamino)butanoate (MC3), 1,1′-(2-(4-(2-((2-(bis(2-hydroxydodecyl)amino)ethyl)(2-hydroxydodecyl)amino)ethyl)piperazin-1-yl)ethylazanediyl)didodecan-2-ol (Tech G1), or a mixture thereof. The cationic lipid may comprise from about 20 mol% to about 50 mol% or about 40 mol% of the total lipid present in the particle.

[0486] In some embodiments, the compound 2,2-Dilinoleyl-4-dimethylaminoethyl-[1,3]-dioxolane can be used to prepare lipid-siRNA nanoparticles. Synthesis of 2,2-Dilinoleyl-4-dimethylaminoethyl-[1,3]-dioxolane is described in U.S. Provisional Pat. Application No. 61/107,998 filed on Oct. 23, 2008, which is herein incorporated by reference.

[0487] In some embodiments, the lipid-siRNA particle includes 40% 2,2-Dilinoleyl-4-dimethylaminoethyl-[1,3]-dioxolane: 10% DSPC: 40% Cholesterol: 10% PEG-C-DOMG (mole percent) with a particle size of 63.0 ± 20 nm and a 0.027 siRNA/Lipid Ratio.

[0488] The non-cationic lipid may be an anionic lipid or a neutral lipid including, but not limited to, distearoylphosphatidylcholine (DSPC), dioleoylphosphatidylcholine (DOPC), dipalmitoylphosphatidylcholine (DPPC), dioleoylphosphatidylglycerol (DOPG), dipalmitoylphosphatidylglycerol (DPPG), dioleoyl-phosphatidylethanolamine (DOPE), palmitoyloleoylphosphatidylcholine (POPC), palmitoyloleoylphosphatidylethanolamine (POPE), dioleoyl- phosphatidylethanolamine 4-(N-maleimidomethyl)-cyclohexane-1- carboxylate (DOPE-mal), dipalmitoyl phosphatidyl ethanolamine (DPPE), dimyristoylphosphoethanolamine (DMPE), distearoyl-phosphatidyl-ethanolamine (DSPE), 16-O-monomethyl PE, 16-O-dimethyl PE, 18-1 -trans PE, 1 -stearoyl-2-oleoyl- phosphatidyethanolamine (SOPE), cholesterol, or a mixture thereof. The non-cationic lipid may be from about 5 mol% to about 90 mol%, about 10 mol%, or about 58 mol% if cholesterol is included, of the total lipid present in the particle.

[0489] The conjugated lipid that inhibits aggregation of particles may be, for example, a polyethyleneglycol (PEG)-lipid including, without limitation, a PEG-diacylglycerol (DAG), a PEG-dialkyloxypropyl (DAA), a PEG-phospholipid, a PEG-ceramide (Cer), or a mixture thereof. The PEG-DAA conjugate may be, for example, a PEG-dilauryloxypropyl (Ci₂), a PEG-dimyristyloxypropyl (Ci₄), a PEG-dipalmityloxypropyl (Ci₆), or a PEG- distearyloxypropyl (C]s). The conjugated lipid that prevents aggregation of particles may be from 0 mol% to about 20 mol% or about 2 mol% of the total lipid present in the particle.

[0490] In some embodiments, the nucleic acid-lipid particle further includes cholesterol at, e.g., about 10 mol% to about 60 mol% or about 48 mol% of the total lipid present in the particle.

[0491] In some embodiments, the iRNA is formulated in a lipid nanoparticle (LNP).

### LNP01

[0492] In some embodiments, the lipidoid ND98·4HCl (MW 1487) (see U.S. Pat. Application No. 12/056,230, filed Mar. 26, 2008, which is herein incorporated by reference), Cholesterol (Sigma-Aldrich), and PEG-Ceramide C16 (Avanti Polar Lipids) can be used to prepare lipid-dsRNA nanoparticles (e.g., LNP01 particles). Stock solutions of each in ethanol can be prepared as follows: ND98, 133 mg/ml; Cholesterol, 25 mg/ml, PEG-Ceramide C16, 100 mg/ml. The ND98, Cholesterol, and PEG-Ceramide C16 stock solutions can then be combined in a, e.g., 42:48:10 molar ratio. The combined lipid solution can be mixed with aqueous dsRNA (e.g., in sodium acetate pH 5) such that the final ethanol concentration is about 35-45% and the final sodium acetate concentration is about 100-300 mM. Lipid-dsRNA nanoparticles typically form spontaneously upon mixing. Depending on the desired particle size distribution, the resultant nanoparticle mixture can be extruded through a polycarbonate membrane (e.g., 100 nm cut-off) using, for example, a thermobarrel extruder, such as Lipex Extruder (Northern Lipids, Inc). In some cases, the extrusion step can be omitted. Ethanol removal and simultaneous buffer exchange can be accomplished by, for example, dialysis or tangential flow filtration. Buffer can be exchanged with, for example, phosphate buffered saline (PBS) at about pH 7, e.g., about pH 6.9, about pH 7.0, about pH 7.1, about pH 7.2, about pH 7.3, or about pH 7.4.

[chemical structure]

[0493] LNP01 formulations are described, e.g., in International Application Publication No. WO 2008/042973, which is hereby incorporated by reference.

[0494] Additional exemplary lipid-dsRNA formulations are provided in the following table.

TABLE 8

Exemplary lipid formulations

| | | |
|---|---|---|
| | Cationic Lipid | cationic lipid/non-cationic lipid/cholesterol/PEG-lipid conjugate Lipid:siRNA ratio |
| SNALP | 1,2-Dilinolenyloxy-N,N-dimethylaminopropane (DLinDMA) | DLinDMA/DPPC/Cholesterol/PEG-cDMA (57.1/7.1/34.4/1.4) lipid:siRNA ∼ 7:1 |
| S-XTC | 2,2-Dilinoleyl-4-dimethylaminoethyl-[1,3]-dioxolane (XTC) | XTC/DPPC/Cholesterol/PEG-cDMA 57.1/7.1/34.4/1.4 lipid:siRNA ∼ 7:1 |
| LNP05 | 2,2-Dilinoleyl-4-dimethylaminoethyl-[1,3]-dioxolane (XTC) | XTC/DSPC/Cholesterol/PEG-DMG 57.5/7.5/31.5/3.5 lipid:siRNA ~ 6:1 |
| LNP06 | 2,2-Dilinoleyl-4-dimethylaminoethyl-[1,3]-dioxolane (XTC) | XTC/DSPC/Cholesterol/PEG-DMG 57.5/7.5/31.5/3.5 lipid:siRNA ∼ 11:1 |
| LNP07 | 2,2-Dilinoleyl-4-dimethylaminoethyl-[1,3]-dioxolane (XTC) | XTC/DSPC/Cholesterol/PEG-DMG 60/7.5/31/1.5, lipid:siRNA ∼ 6:1 |
| LNP08 | 2,2-Dilinoleyl-4-dimethylaminoethyl-[1,3]-dioxolane (XTC) | XTC/DSPC/Cholesterol/PEG-DMG 60/7.5/31/1.5, lipid:siRNA ∼ 11:1 |
| LNP09 | 2,2-Dilinoleyl-4-dimethylaminoethyl-[1,3]-dioxolane (XTC) | XTC/DSPC/Cholesterol/PEG-DMG 50/10/38.5/1.5 Lipid:siRNA 10:1 |
| LNP10 | (3aR,5s,6aS)-N,N-dimethyl-2,2-di((9Z,12Z)-octadeca-9,12-dienyl)tetrahydro-3aH-cyclopenta[d] [1,3]dioxol-5-amine (ALN100) | ALN100/DSPC/Cholesterol/PEG-DMG 50/10/38.5/1.5 Lipid:siRNA 10:1 |
| LNP11 | (6Z,9Z,28Z,31Z)-heptatriaconta-6,9,28,31-tetraen-19-yl 4-(dimethylamino)butanoate (MC3) | MC-3/DSPC/Cholesterol/PEG-DMG 50/10/38.5/1.5 Lipid:siRNA 10:1 |
| LNP12 | 1,1′-(2-(4-(2-((2-(bis(2-hydroxydodecyl)amino)ethyl)(2-hydroxydodecyl)amino)ethyl)piperazin-1-yl)ethylazanediyl)didodecan-2-ol (C12-200) | C12-200/DSPC/Cholesterol/PEG-DMG 50/10/38.5/1.5 Lipid:siRNA 10:1 |
| LNP13 | XTC | XTC/DSPC/Chol/PEG-DMG 50/10/38.5/1.5 Lipid:siRNA: 33:1 |
| LNP14 | MC3 | MC3/DSPC/Chol/PEG-DMG 40/15/40/5 Lipid: siRNA: 11:1 |
| LNP15 | MC3 | MC3/DSPC/Chol/PEG-DSG/GalNAc-PEG-DSG 50/10/35/4.5/0.5 Lipid: siRNA: 11:1 |
| LNP16 | MC3 | MC3/DSPC/Chol/PEG-DMG 50/10/38.5/1.5 Lipid:siRNA: 7:1 |
| LNP17 | MC3 | MC3/DSPC/Chol/PEG-DSG 50/10/38.5/1.5 Lipid: siRNA: 10:1 |
| LNP18 | MC3 | MC3/DSPC/Chol/PEG-DMG 50/10/38.5/1.5 Lipid: siRNA: 12:1 |
| LNP19 | MC3 | MC3/DSPC/Chol/PEG-DMG 50/10/35/5 |
| LNP20 | MC3 | MC3/DSPC/Chol/PEG-DPG 50/10/38.5/1.5 Lipid: siRNA: 10:1 |
| LNP21 | C 12-200 | C12-200/DSPC/Chol/PEG-DSG 50/10/38.5/1.5 Lipid:siRNA: 7:1 |
| LNP22 | XTC | XTC/DSPC/Chol/PEG-DSG 50/10/38.5/1.5 Lipid: siRNA: 10:1 |

DSPC: distearoylphosphatidylcholine
DPPC: dipalmitoylphosphatidylcholine
PEG-DMG: PEG-didimyristoyl glycerol (C14-PEG, or PEG-C14) (PEG with avg mol wt of 2000)
PEG-DSG: PEG-distyryl glycerol (C18-PEG, or PEG-C18) (PEG with avg mol wt of 2000)
PEG-cDMA: PEG-carbamoyl-1,2-dimyristyloxypropylamine (PEG with avg mol wt of 2000)

[0495] SNALP (1,2-Dilinolenyloxy-N,N-dimethylaminopropane (DLinDMA)) comprising formulations are described in International Publication No. WO2009/127060, filed Apr. 15, 2009, which is hereby incorporated by reference.

[0496] XTC comprising formulations are described, e.g., in U.S. Provisional Serial No. 61/148,366, filed Jan. 29, 2009; U.S. Provisional Serial No. 61/156,851, filed Mar. 2, 2009; U.S. Provisional Serial No. 61/185,712, filed Jun. 10, 2009; U.S. Provisional Serial No. 61/228,373, filed Jul. 24, 2009; U.S. Provisional Serial No. 61/239,686, filed Sep. 3, 2009, and International Application No. PCT/US2010/022614, filed Jan. 29, 2010, which are hereby incorporated by reference.

[0497] MC3 comprising formulations are described, e.g., in U.S. Provisional Serial No. 61/244,834, filed Sep. 22, 2009, U.S. Provisional Serial No. 61/185,800, filed Jun. 10, 2009, and International Application No. PCT/US10/28224, filed Jun. 10, 2010, which are hereby incorporated by reference.

[0498] ALNY-100 comprising formulations are described, e.g., International patent application number PCT/US09/63933, filed on Nov. 10, 2009, which is hereby incorporated by reference.

[0499] C12-200 comprising formulations are described in U.S. Provisional Serial No. 61/175,770, filed May 5, 2009 and International Application No. PCT/US 10/33777, filed May 5, 2010, which are hereby incorporated by reference.

### Synthesis of Cationic Lipids

[0500] Any of the compounds, e.g., cationic lipids and the like, used in the nucleic acid-lipid particles featured in the disclosure may be prepared by known organic synthesis techniques. All substituents are as defined below unless indicated otherwise.

[0501] “Alkyl” means a straight chain or branched, noncyclic or cyclic, saturated aliphatic hydrocarbon containing from 1 to 24 carbon atoms. Representative saturated straight chain alkyls include methyl, ethyl, n-propyl, n-butyl, n-pentyl, n-hexyl, and the like; while saturated branched alkyls include isopropyl, sec-butyl, isobutyl, tert-butyl, isopentyl, and the like. Representative saturated cyclic alkyls include cyclopropyl, cyclobutyl, cyclopentyl, cyclohexyl, and the like; while unsaturated cyclic alkyls include cyclopentenyl and cyclohexenyl, and the like.

[0502] “Alkenyl” means an alkyl, as defined above, containing at least one double bond between adjacent carbon atoms. Alkenyls include both cis and trans isomers. Representative straight chain and branched alkenyls include ethylenyl, propylenyl, 1-butenyl, 2-butenyl, isobutylenyl, 1-pentenyl, 2-pentenyl, 3-methyl-1-butenyl, 2-methyl-2-butenyl, 2,3-dimethyl-2-butenyl, and the like.

[0503] “Alkynyl” means any alkyl or alkenyl, as defined above, which additionally contains at least one triple bond between adjacent carbons. Representative straight chain and branched alkynyls include acetylenyl, propynyl, 1-butynyl, 2-butynyl, 1-pentynyl, 2-pentynyl, 3-methyl-1 butynyl, and the like.

[0504] “Acyl” means any alkyl, alkenyl, or alkynyl wherein the carbon at the point of attachment is substituted with an oxo group, as defined below. For example, —C(═O)alkyl, —C(═O)alkenyl, and —C(═O)alkynyl are acyl groups.

[0505] “Heterocycle” means a 5- to 7-membered monocyclic, or 7- to 10-membered bicyclic, heterocyclic ring which is either saturated, unsaturated, or aromatic, and which contains from 1 or 2 heteroatoms independently selected from nitrogen, oxygen and sulfur, and wherein the nitrogen and sulfur heteroatoms may be optionally oxidized, and the nitrogen heteroatom may be optionally quaternized, including bicyclic rings in which any of the above heterocycles are fused to a benzene ring. The heterocycle may be attached via any heteroatom or carbon atom. Heterocycles include heteroaryls as defined below. Heterocycles include morpholinyl, pyrrolidinonyl, pyrrolidinyl, piperidinyl, piperizynyl, hydantoinyl, valerolactamyl, oxiranyl, oxetanyl, tetrahydrofuranyl, tetrahydropyranyl, tetrahydropyridinyl, tetrahydroprimidinyl, tetrahydrothiophenyl, tetrahydrothiopyranyl, tetrahydropyrimidinyl, tetrahydrothiophenyl, tetrahydrothiopyranyl, and the like.

[0506] The terms “optionally substituted alkyl”, “optionally substituted alkenyl”, “optionally substituted alkynyl”, “optionally substituted acyl”, and “optionally substituted heterocycle” means that, when substituted, at least one hydrogen atom is replaced with a substituent. In the case of an oxo substituent (=O) two hydrogen atoms are replaced. In this regard, substituents include oxo, halogen, heterocycle, —CN, —OR^{x}, —NR^{x}R^{y}, —NR^{x}C(═O)R^{y}, —NR^{x}SO₂R^{y}, —C(═O)R^{x}, —C(═O)OR^{x}, —C(═O)NR^{x}R^{y}, —SOₙR^{x} and —SOₙNR^{x}R^{y}, wherein n is 0, 1 or 2, R^{x} and R^{y} are the same or different and independently hydrogen, alkyl or heterocycle, and each of said alkyl and heterocycle substituents may be further substituted with one or more of oxo, halogen, —OH, —CN, alkyl, —OR^{x}, heterocycle, —NR^{x}R^{y}, —NR^{x}C(═O)R^{y}, —NR^{x}SO₂R^{y}, —C(═O)R^{x}, —C(═O)OR^{x}, —C(═O)NR^{x}R^{y}, -SOₙR^{x} and —SOₙNR^{x}R^{y}.

[0507] “Halogen” means fluoro, chloro, bromo and iodo.

[0508] In some embodiments, the methods featured in the disclosure may require the use of protecting groups. Protecting group methodology is well known to those skilled in the art (see, for example, PROTECTIVE GROUPS IN ORGANIC SYNTHESIS, Green, T.W. et al., Wiley-Interscience, New York City, 1999). Briefly, protecting groups within the context of this disclosure are any group that reduces or eliminates unwanted reactivity of a functional group. A protecting group can be added to a functional group to mask its reactivity during certain reactions and then removed to reveal the original functional group. In some embodiments an “alcohol protecting group” is used. An “alcohol protecting group” is any group which decreases or eliminates unwanted reactivity of an alcohol functional group. Protecting groups can be added and removed using techniques well known in the art.

### Synthesis of Formula A

[0509] In some embodiments, nucleic acid-lipid particles featured in the disclosure are formulated using a cationic lipid of formula A:

[chemical structure]

where R1 and R2 are independently alkyl, alkenyl or alkynyl, each can be optionally substituted, and R3 and R4 are independently lower alkyl or R3 and R4 can be taken together to form an optionally substituted heterocyclic ring. In some embodiments, the cationic lipid is XTC (2,2-Dilinoleyl-4-dimethylaminoethyl-[1,3]-dioxolane). In general, the lipid of formula A above may be made by the following Reaction Schemes 1 or 2, wherein all substituents are as defined above unless indicated otherwise.

[chemical structure]

[chemical structure]

[0510] Lipid A, where R₁ and R₂ are independently alkyl, alkenyl or alkynyl, each can be optionally substituted, and R₃ and R₄ are independently lower alkyl or R₃ and R₄ can be taken together to form an optionally substituted heterocyclic ring, can be prepared according to Scheme 1. Ketone 1 and bromide 2 can be purchased or prepared according to methods known to those of ordinary skill in the art. Reaction of 1 and 2 yields ketal 3. Treatment of ketal 3 with amine 4 yields lipids of formula A. The lipids of formula A can be converted to the corresponding ammonium salt with an organic salt of formula 5, where X is anion counter ion selected from halogen, hydroxide, phosphate, sulfate, or the like.

[chemical structure]

[0511] Alternatively, the ketone 1 starting material can be prepared according to Scheme 2. Grignard reagent 6 and cyanide 7 can be purchased or prepared according to methods known to those of ordinary skill in the art. Reaction of 6 and 7 yields ketone 1. Conversion of ketone 1 to the corresponding lipids of formula A is as described in Scheme 1.

### Synthesis of MC3

[0512] Preparation of DLin-M-C3-DMA (i.e., (6Z,9Z,28Z,31Z)-heptatriaconta-6,9,28,31-tetraen-19-yl 4-(dimethylamino)butanoate) was as follows. A solution of (6Z,9Z,28Z,31Z)-heptatriaconta-6,9,28,31-tetraen-19-ol (0.53 g), 4-N,N-dimethylaminobutyric acid hydrochloride (0.51 g), 4-N,N-dimethylaminopyridine (0.61 g) and 1-ethyl-3-(3-dimethylaminopropyl)carbodiimide hydrochloride (0.53 g) in dichloromethane (5 mL) was stirred at room temperature overnight. The solution was washed with dilute hydrochloric acid followed by dilute aqueous sodium bicarbonate. The organic fractions were dried over anhydrous magnesium sulphate, filtered and the solvent removed on a rotovap. The residue was passed down a silica gel column (20 g) using a 1-5% methanol/dichloromethane elution gradient. Fractions containing the purified product were combined and the solvent removed, yielding a colorless oil (0.54 g).

### Synthesis of ALNY-100

[0513] Synthesis of ketal 519 [ALNY-100] was performed using the following scheme 3:

[chemical structure]

### Synthesis of 515

[0514] To a stirred suspension of LiAlH4 (3.74 g, 0.09852 mol) in 200 ml anhydrous THF in a two neck RBF (1L), was added a solution of 514 (10 g, 0.04926 mol) in 70 mL of THF slowly at 0 0C under nitrogen atmosphere. After complete addition, reaction mixture was warmed to room temperature and then heated to reflux for 4 h. Progress of the reaction was monitored by TLC. After completion of reaction (by TLC) the mixture was cooled to 0° C. and quenched with careful addition of saturated Na2SO4 solution. Reaction mixture was stirred for 4 h at room temperature and filtered off. Residue was washed well with THF. The filtrate and washings were mixed and diluted with 400 mL dioxane and 26 mL conc. HCl and stirred for 20 minutes at room temperature. The volatilities were stripped off under vacuum to furnish the hydrochloride salt of 515 as a white solid. Yield: 7.12 g 1H-NMR (DMSO, 400 MHz): δ= 9.34 (broad, 2H), 5.68 (s, 2H), 3.74 (m, 1H), 2.66-2.60 (m, 2H), 2.50-2.45 (m, 5H).

### Synthesis of 516

[0515] To a stirred solution of compound 515 in 100 mL dry DCM in a 250 mL two neck RBF, was added NEt3 (37.2 mL, 0.2669 mol) and cooled to 0° C. under nitrogen atmosphere. After a slow addition of N-(benzyloxy-carbonyloxy)-succinimide (20 g, 0.08007 mol) in 50 mL dry DCM, reaction mixture was allowed to warm to room temperature. After completion of the reaction (2-3 h by TLC) mixture was washed successively with 1N HCl solution (1 x 100 mL) and saturated NaHCO3 solution (1 x 50 mL). The organic layer was then dried over anhyd. Na2SO4 and the solvent was evaporated to give crude material which was purified by silica gel column chromatography to get 516 as sticky mass. Yield: 11 g (89%). 1H-NMR (CDCl3, 400 MHz): δ = 7.36-7.27(m, 5H), 5.69 (s, 2H), 5.12 (s, 2H), 4.96 (br., 1H) 2.74 (s, 3H), 2.60(m, 2H), 2.30-2.25(m, 2H). LC-MS [M+H] -232.3 (96.94%).

### Synthesis of 517A and 517B

[0516] The cyclopentene 516 (5 g, 0.02164 mol) was dissolved in a solution of 220 mL acetone and water (10:1) in a single neck 500 mL RBF and to it was added N-methyl morpholine-N-oxide (7.6 g, 0.06492 mol) followed by 4.2 mL of 7.6% solution of OsO4 (0.275 g, 0.00108 mol) in tert-butanol at room temperature. After completion of the reaction (~ 3 h), the mixture was quenched with addition of solid Na2SO3 and resulting mixture was stirred for 1.5 h at room temperature. Reaction mixture was diluted with DCM (300 mL) and washed with water (2 x 100 mL) followed by saturated NaHCO3 (1 x 50 mL) solution, water (1 x 30 mL) and finally with brine (1x 50 mL). Organic phase was dried over an.Na2SO4 and solvent was removed in vacuum. Silica gel column chromatographic purification of the crude material was afforded a mixture of diastereomers, which were separated by prep HPLC. Yield: - 6 g crude

[0517] 517A - Peak-1 (white solid), 5.13 g (96%). 1H-NMR (DMSO, 400 MHz): δ= 7.39-7.31(m, 5H), 5.04(s, 2H), 4.78-4.73 (m, 1H), 4.48-4.47(d, 2H), 3.94-3.93(m, 2H), 2.71(s, 3H), 1.72- 1.67(m, 4H). LC-MS - [M+H]-266.3, [M+NH4 +]-283.5 present, HPLC-97.86%. Stereochemistry confirmed by X-ray.

### Synthesis of 518

[0518] Using a procedure analogous to that described for the synthesis of compound 505, compound 518 (1.2 g, 41%) was obtained as a colorless oil. 1H-NMR (CDCl3, 400 MHz): δ= 7.35-7.33(m, 4H), 7.30-7.27(m, 1H), 5.37-5.27(m, 8H), 5.12(s, 2H), 4.75(m,1H), 4.58-4.57(m,2H), 2.78-2.74(m,7H), 2.06-2.00(m,8H), 1.96-1.91(m, 2H), 1.62(m, 4H), 1.48(m, 2H), 1.37-1.25(br m, 36H), 0.87(m, 6H). HPLC-98.65%.

### General Procedure for the Synthesis of Compound 519

[0519] A solution of compound 518 (1 eq) in hexane (15 mL) was added in a drop-wise fashion to an ice-cold solution of LAH in THF (1 M, 2 eq). After complete addition, the mixture was heated at 40° C. over 0.5 h then cooled again on an ice bath. The mixture was carefully hydrolyzed with saturated aqueous Na2SO4 then filtered through celite and reduced to an oil. Column chromatography provided the pure 519 (1.3 g, 68%) which was obtained as a colorless oil. 13C NMR = 130.2, 130.1 (x2), 127.9 (x3), 112.3, 79.3, 64.4, 44.7, 38.3, 35.4, 31.5, 29.9 (x2), 29.7, 29.6 (x2), 29.5 (x3), 29.3 (x2), 27.2 (x3), 25.6, 24.5, 23.3, 226, 14.1; Electrospray MS (+ve): Molecular weight for C44H80NO2 (M + H)+ Calc. 654.6, Found 654.6.

[0520] Formulations prepared by either the standard or extrusion-free method can be characterized in similar manners. For example, formulations are typically characterized by visual inspection. They should be whitish translucent solutions free from aggregates or sediment. Particle size and particle size distribution of lipid-nanoparticles can be measured by light scattering using, for example, a Malvern Zetasizer Nano ZS (Malvern, USA). Particles should be about 20-300 nm, such as 40-100 nm in size. The particle size distribution should be unimodal. The total dsRNA concentration in the formulation, as well as the entrapped fraction, is estimated using a dye exclusion assay. A sample of the formulated dsRNA can be incubated with an RNA-binding dye, such as Ribogreen (Molecular Probes) in the presence or absence of a formulation disrupting surfactant, e.g., 0.5% Triton-X100. The total dsRNA in the formulation can be determined by the signal from the sample containing the surfactant, relative to a standard curve. The entrapped fraction is determined by subtracting the “free” dsRNA content (as measured by the signal in the absence of surfactant) from the total dsRNA content. Percent entrapped dsRNA is typically >85%. For SNALP formulation, the particle size is at least 30 nm, at least 40 nm, at least 50 nm, at least 60 nm, at least 70 nm, at least 80 nm, at least 90 nm, at least 100 nm, at least 110 nm, and at least 120 nm. The suitable range is typically about at least 50 nm to about at least 110 nm, about at least 60 nm to about at least 100 nm, or about at least 80 nm to about at least 90 nm.

[0521] Compositions and formulations for oral administration include powders or granules, microparticulates, nanoparticulates, suspensions or solutions in water or non-aqueous media, capsules, gel capsules, sachets, tablets or minitablets. Thickeners, flavoring agents, diluents, emulsifiers, dispersing aids or binders may be desirable. In some embodiments, oral formulations are those in which dsRNAs featured in the disclosure are administered in conjunction with one or more penetration enhancers surfactants and chelators. Suitable surfactants include fatty acids and/or esters or salts thereof, bile acids and/or salts thereof. Suitable bile acids/salts include chenodeoxycholic acid (CDCA) and ursodeoxychenodeoxycholic acid (UDCA), cholic acid, dehydrocholic acid, deoxycholic acid, glucholic acid, glycholic acid, glycodeoxycholic acid, taurocholic acid, taurodeoxycholic acid, sodium tauro-24,25-dihydro-fusidate and sodium glycodihydrofusidate. Suitable fatty acids include arachidonic acid, undecanoic acid, oleic acid, lauric acid, caprylic acid, capric acid, myristic acid, palmitic acid, stearic acid, linoleic acid, linolenic acid, dicaprate, tricaprate, monoolein, dilaurin, glyceryl 1-monocaprate, 1-dodecylazacycloheptan-2-one, an acylcarnitine, an acylcholine, or a monoglyceride, a diglyceride or a pharmaceutically acceptable salt thereof (e.g., sodium). In some embodiments, combinations of penetration enhancers are used, for example, fatty acids/salts in combination with bile acids/salts. One exemplary combination is the sodium salt of lauric acid, capric acid and UDCA. Further penetration enhancers include polyoxyethylene-9-lauryl ether, polyoxyethylene-20-cetyl ether. DsRNAs featured in the disclosure may be delivered orally, in granular form including sprayed dried particles, or complexed to form micro or nanoparticles. DsRNA complexing agents include poly-amino acids; polyimines; polyacrylates; polyalkylacrylates, polyoxethanes, polyalkylcyanoacrylates; cationized gelatins, albumins, starches, acrylates, polyethyleneglycols (PEG) and starches; polyalkylcyanoacrylates; DEAE-derivatized polyimines, pollulans, celluloses and starches. Suitable complexing agents include chitosan, N-trimethylchitosan, poly-L-lysine, polyhistidine, polyornithine, polyspermines, protamine, polyvinylpyridine, polythiodiethylaminomethylethylene P(TDAE), polyaminostyrene (e.g., p-amino), poly(methylcyanoacrylate), poly(ethylcyanoacrylate), poly(butylcyanoacrylate), poly(isobutylcyanoacrylate), poly(isohexylcynaoacrylate), DEAE-methacrylate, DEAE-hexylacrylate, DEAE-acrylamide, DEAE-albumin and DEAE-dextran, polymethylacrylate, polyhexylacrylate, poly(D,L-lactic acid), poly(DL-lactic-co-glycolic acid (PLGA), alginate, and polyethyleneglycol (PEG). Oral formulations for dsRNAs and their preparation are described in detail in U.S. Pat. 6,887,906, US Publn. No. 20030027780, and U.S. Pat. No. 6,747,014, each of which is incorporated herein by reference.

[0522] Compositions and formulations for parenteral, intraparenchymal (into the brain), intrathecal, intravitreal, subretinal, transscleral, subconjunctival, retrobulbar, intracameral, intraventricular, or intrahepatic administration may include sterile aqueous solutions which may also contain buffers, diluents and other suitable additives such as, but not limited to, penetration enhancers, carrier compounds and other pharmaceutically acceptable carriers or excipients.

[0523] Pharmaceutical compositions of the present disclosure include, but are not limited to, solutions, emulsions, and liposome-containing formulations. These compositions may be generated from a variety of components that include, but are not limited to, preformed liquids, self-emulsifying solids and self-emulsifying semisolids.

[0524] The pharmaceutical formulations featured in the present disclosure, which may conveniently be presented in unit dosage form, may be prepared according to conventional techniques well known in the pharmaceutical industry. Such techniques include the step of bringing into association the active ingredients with the pharmaceutical carrier(s) or excipient(s). In general, the formulations are prepared by uniformly and intimately bringing into association the active ingredients with liquid carriers or finely divided solid carriers or both, and then, if necessary, shaping the product.

[0525] The compositions featured in the present disclosure may be formulated into any of many possible dosage forms such as, but not limited to, tablets, capsules, gel capsules, liquid syrups, soft gels, suppositories, and enemas. The compositions may also be formulated as suspensions in aqueous, non-aqueous or mixed media. Aqueous suspensions may further contain substances which increase the viscosity of the suspension including, for example, sodium carboxymethylcellulose, sorbitol and/or dextran. The suspension may also contain stabilizers.

### Additional Formulations

### Emulsions

[0526] The compositions of the present disclosure may be prepared and formulated as emulsions. Emulsions are typically heterogeneous systems of one liquid dispersed in another in the form of droplets usually exceeding 0.1 µm in diameter (see e.g., Ansel’s Pharmaceutical Dosage Forms and Drug Delivery Systems, Allen, LV., Popovich NG., and Ansel HC., 2004, Lippincott Williams & Wilkins (8th ed.), New York, NY; Idson, in Pharmaceutical Dosage Forms, Lieberman, Rieger and Banker (Eds.), 1988, Marcel Dekker, Inc., New York, N.Y., volume 1, p. 199; Rosoff, in Pharmaceutical Dosage Forms, Lieberman, Rieger and Banker (Eds.), 1988, Marcel Dekker, Inc., New York, N.Y., Volume 1, p. 245; Block in Pharmaceutical Dosage Forms, Lieberman, Rieger and Banker (Eds.), 1988, Marcel Dekker, Inc., New York, N.Y., volume 2, p. 335; Higuchi et al., in Remington’s Pharmaceutical Sciences, Mack Publishing Co., Easton, Pa., 1985, p. 301). Emulsions are often biphasic systems comprising two immiscible liquid phases intimately mixed and dispersed with each other. In general, emulsions may be of either the water-in-oil (w/o) or the oil-in-water (o/w) variety. When an aqueous phase is finely divided into and dispersed as minute droplets into a bulk oily phase, the resulting composition is called a water-in-oil (w/o) emulsion. Alternatively, when an oily phase is finely divided into and dispersed as minute droplets into a bulk aqueous phase, the resulting composition is called an oil-in-water (o/w) emulsion. Emulsions may contain additional components in addition to the dispersed phases, and the active drug which may be present as a solution in either the aqueous phase, oily phase or itself as a separate phase. Pharmaceutical excipients such as emulsifiers, stabilizers, dyes, and anti-oxidants may also be present in emulsions as needed. Pharmaceutical emulsions may also be multiple emulsions that are comprised of more than two phases such as, for example, in the case of oil-in-water-in-oil (o/w/o) and water-in-oil-in-water (w/o/w) emulsions. Such complex formulations often provide certain advantages that simple binary emulsions do not. Multiple emulsions in which individual oil droplets of an o/w emulsion enclose small water droplets constitute a w/o/w emulsion. Likewise, a system of oil droplets enclosed in globules of water stabilized in an oily continuous phase provides an o/w/o emulsion.

[0527] Emulsions are characterized by little or no thermodynamic stability. Often, the dispersed or discontinuous phase of the emulsion is well dispersed into the external or continuous phase and maintained in this form through the means of emulsifiers or the viscosity of the formulation. Either of the phases of the emulsion may be a semisolid or a solid, as is the case of emulsion-style ointment bases and creams. Other means of stabilizing emulsions entail the use of emulsifiers that may be incorporated into either phase of the emulsion. Emulsifiers may broadly be classified into four categories: synthetic surfactants, naturally occurring emulsifiers, absorption bases, and finely dispersed solids (see e.g., Ansel’s Pharmaceutical Dosage Forms and Drug Delivery Systems, Allen, LV., Popovich NG., and Ansel HC., 2004, Lippincott Williams & Wilkins (8th ed.), New York, NY; Idson, in Pharmaceutical Dosage Forms, Lieberman, Rieger and Banker (Eds.), 1988, Marcel Dekker, Inc., New York, N.Y., volume 1, p. 199).

[0528] Synthetic surfactants, also known as surface active agents, have found wide applicability in the formulation of emulsions and have been reviewed in the literature (see e.g., Ansel’s Pharmaceutical Dosage Forms and Drug Delivery Systems, Allen, LV., Popovich NG., and Ansel HC., 2004, Lippincott Williams & Wilkins (8th ed.), New York, NY; Rieger, in Pharmaceutical Dosage Forms, Lieberman, Rieger and Banker (Eds.), 1988, Marcel Dekker, Inc., New York, N.Y., volume 1, p. 285; Idson, in Pharmaceutical Dosage Forms, Lieberman, Rieger and Banker (Eds.), Marcel Dekker, Inc., New York, N.Y., 1988, volume 1, p. 199). Surfactants are typically amphiphilic and comprise a hydrophilic and a hydrophobic portion. The ratio of the hydrophilic to the hydrophobic nature of the surfactant has been termed the hydrophile/lipophile balance (HLB) and is a valuable tool in categorizing and selecting surfactants in the preparation of formulations. Surfactants may be classified into different classes based on the nature of the hydrophilic group: nonionic, anionic, cationic and amphoteric (see e.g., Ansel’s Pharmaceutical Dosage Forms and Drug Delivery Systems, Allen, LV., Popovich NG., and Ansel HC., 2004, Lippincott Williams & Wilkins (8th ed.), New York, NY Rieger, in Pharmaceutical Dosage Forms, Lieberman, Rieger and Banker (Eds.), 1988, Marcel Dekker, Inc., New York, N.Y., volume 1, p. 285).

[0529] Naturally occurring emulsifiers used in emulsion formulations include lanolin, beeswax, phosphatides, lecithin and acacia. Absorption bases possess hydrophilic properties such that they can soak up water to form w/o emulsions yet retain their semisolid consistencies, such as anhydrous lanolin and hydrophilic petrolatum. Finely divided solids have also been used as good emulsifiers especially in combination with surfactants and in viscous preparations. These include polar inorganic solids, such as heavy metal hydroxides, nonswelling clays such as bentonite, attapulgite, hectorite, kaolin, montmorillonite, colloidal aluminum silicate and colloidal magnesium aluminum silicate, pigments and nonpolar solids such as carbon or glyceryl tristearate.

[0530] A large variety of non-emulsifying materials are also included in emulsion formulations and contribute to the properties of emulsions. These include fats, oils, waxes, fatty acids, fatty alcohols, fatty esters, humectants, hydrophilic colloids, preservatives and antioxidants (Block, in Pharmaceutical Dosage Forms, Lieberman, Rieger and Banker (Eds.), 1988, Marcel Dekker, Inc., New York, N.Y., volume 1, p. 335; Idson, in Pharmaceutical Dosage Forms, Lieberman, Rieger and Banker (Eds.), 1988, Marcel Dekker, Inc., New York, N.Y., volume 1, p. 199).

[0531] Hydrophilic colloids or hydrocolloids include naturally occurring gums and synthetic polymers such as polysaccharides (for example, acacia, agar, alginic acid, carrageenan, guar gum, karaya gum, and tragacanth), cellulose derivatives (for example, carboxymethylcellulose and carboxypropylcellulose), and synthetic polymers (for example, carbomers, cellulose ethers, and carboxyvinyl polymers). These disperse or swell in water to form colloidal solutions that stabilize emulsions by forming strong interfacial films around the dispersed-phase droplets and by increasing the viscosity of the external phase.

[0532] Since emulsions often contain a number of ingredients such as carbohydrates, proteins, sterols and phosphatides that may readily support the growth of microbes, these formulations often incorporate preservatives. Commonly used preservatives included in emulsion formulations include methyl paraben, propyl paraben, quaternary ammonium salts, benzalkonium chloride, esters of p-hydroxybenzoic acid, and boric acid. Antioxidants are also commonly added to emulsion formulations to prevent deterioration of the formulation. Antioxidants used may be free radical scavengers such as tocopherols, alkyl gallates, butylated hydroxyanisole, butylated hydroxytoluene, or reducing agents such as ascorbic acid and sodium metabisulfite, and antioxidant synergists such as citric acid, tartaric acid, and lecithin.

[0533] The application of emulsion formulations via dermatological, oral and parenteral routes and methods for their manufacture have been reviewed in the literature (see e.g., Ansel’s Pharmaceutical Dosage Forms and Drug Delivery Systems, Allen, LV., Popovich NG., and Ansel HC., 2004, Lippincott Williams & Wilkins (8th ed.), New York, NY; Idson, in Pharmaceutical Dosage Forms, Lieberman, Rieger and Banker (Eds.), 1988, Marcel Dekker, Inc., New York, N.Y., volume 1, p. 199). Emulsion formulations for oral delivery have been very widely used because of ease of formulation, as well as efficacy from an absorption and bioavailability standpoint (see e.g., Ansel’s Pharmaceutical Dosage Forms and Drug Delivery Systems, Allen, LV., Popovich NG., and Ansel HC., 2004, Lippincott Williams & Wilkins (8th ed.), New York, NY; Rosoff, in Pharmaceutical Dosage Forms, Lieberman, Rieger and Banker (Eds.), 1988, Marcel Dekker, Inc., New York, N.Y., volume 1, p. 245; Idson, in Pharmaceutical Dosage Forms, Lieberman, Rieger and Banker (Eds.), 1988, Marcel Dekker, Inc., New York, N.Y., volume 1, p. 199). Mineral-oil base laxatives, oil-soluble vitamins and high fat nutritive preparations are among the materials that have commonly been administered orally as o/w emulsions.

[0534] In some embodiments of the present disclosure, the compositions of iRNAs and nucleic acids are formulated as microemulsions. A microemulsion may be defined as a system of water, oil and amphiphile which is a single optically isotropic and thermodynamically stable liquid solution (see e.g., Ansel’s Pharmaceutical Dosage Forms and Drug Delivery Systems, Allen, LV., Popovich NG., and Ansel HC., 2004, Lippincott Williams & Wilkins (8th ed.), New York, NY; Rosoff, in Pharmaceutical Dosage Forms, Lieberman, Rieger and Banker (Eds.), 1988, Marcel Dekker, Inc., New York, N.Y., volume 1, p. 245). Typically, microemulsions are systems that are prepared by first dispersing an oil in an aqueous surfactant solution and then adding a sufficient amount of a fourth component, generally an intermediate chain-length alcohol to form a transparent system. Therefore, microemulsions have also been described as thermodynamically stable, isotopically clear dispersions of two immiscible liquids that are stabilized by interfacial films of surface-active molecules (Leung and Shah, in: Controlled Release of Drugs: Polymers and Aggregate Systems, Rosoff, M., Ed., 1989, VCH Publishers, New York, pages 185-215). Microemulsions commonly are prepared via a combination of three to five components that include oil, water, surfactant, cosurfactant and electrolyte. Whether the microemulsion is of the water-in-oil (w/o) or an oil-in-water (o/w) type is dependent on the properties of the oil and surfactant used and on the structure and geometric packing of the polar heads and hydrocarbon tails of the surfactant molecules (Schott, in Remington’s Pharmaceutical Sciences, Mack Publishing Co., Easton, Pa., 1985, p. 271).

[0535] The phenomenological approach utilizing phase diagrams has been extensively studied and has yielded a comprehensive knowledge, to one skilled in the art, of how to formulate microemulsions (see e.g., Ansel’s Pharmaceutical Dosage Forms and Drug Delivery Systems, Allen, LV., Popovich NG., and Ansel HC., 2004, Lippincott Williams & Wilkins (8th ed.), New York, NY; Rosoff, in Pharmaceutical Dosage Forms, Lieberman, Rieger and Banker (Eds.), 1988, Marcel Dekker, Inc., New York, N.Y., volume 1, p. 245; Block, in Pharmaceutical Dosage Forms, Lieberman, Rieger and Banker (Eds.), 1988, Marcel Dekker, Inc., New York, N.Y., volume 1, p. 335). Compared to conventional emulsions, microemulsions offer the advantage of solubilizing water-insoluble drugs in a formulation of thermodynamically stable droplets that are formed spontaneously.

[0536] Surfactants used in the preparation of microemulsions include, but are not limited to, ionic surfactants, non-ionic surfactants, Brij 96, polyoxyethylene oleyl ethers, polyglycerol fatty acid esters, tetraglycerol monolaurate (ML310), tetraglycerol monooleate (MO310), hexaglycerol monooleate (PO310), hexaglycerol pentaoleate (PO500), decaglycerol monocaprate (MCA750), decaglycerol monooleate (MO750), decaglycerol sequioleate (SO750), decaglycerol decaoleate (DAO750), alone or in combination with cosurfactants. The cosurfactant, usually a short-chain alcohol such as ethanol, 1-propanol, and 1-butanol, serves to increase the interfacial fluidity by penetrating into the surfactant film and consequently creating a disordered film because of the void space generated among surfactant molecules. Microemulsions may, however, be prepared without the use of cosurfactants and alcohol-free self-emulsifying microemulsion systems are known in the art. The aqueous phase may typically be, but is not limited to, water, an aqueous solution of the drug, glycerol, PEG300, PEG400, polyglycerols, propylene glycols, and derivatives of ethylene glycol. The oil phase may include, but is not limited to, materials such as Captex 300, Captex 355, Capmul MCM, fatty acid esters, medium chain (C8-C12) mono, di, and tri-glycerides, polyoxyethylated glyceryl fatty acid esters, fatty alcohols, polyglycolized glycerides, saturated polyglycolized C8-C10 glycerides, vegetable oils and silicone oil.

[0537] Microemulsions are particularly of interest from the standpoint of drug solubilization and the enhanced absorption of drugs. Lipid based microemulsions (both o/w and w/o) have been proposed to enhance the oral bioavailability of drugs, including peptides (see e.g., U.S. Pat. Nos. 6,191,105; 7,063,860; 7,070,802; 7,157,099; Constantinides et al., Pharmaceutical Research, 1994, 11, 1385-1390; Ritschel, Meth. Find. Exp. Clin. Pharmacol., 1993, 13, 205). Microemulsions afford advantages of improved drug solubilization, protection of drug from enzymatic hydrolysis, possible enhancement of drug absorption due to surfactant-induced alterations in membrane fluidity and permeability, ease of preparation, ease of oral administration over solid dosage forms, improved clinical potency, and decreased toxicity (see e.g., U.S. Pat. Nos. 6,191,105; 7,063,860; 7,070,802; 7,157,099; Constantinides et al., Pharmaceutical Research, 1994, 11, 1385; Ho et al., J. Pharm. Sci., 1996, 85, 138-143). Often microemulsions may form spontaneously when their components are brought together at ambient temperature. This may be particularly advantageous when formulating thermolabile drugs, peptides or iRNAs. Microemulsions have also been effective in the transdermal delivery of active components in both cosmetic and pharmaceutical applications. It is expected that the microemulsion compositions and formulations of the present disclosure will facilitate the increased systemic absorption of iRNAs and nucleic acids from the gastrointestinal tract, as well as improve the local cellular uptake of iRNAs and nucleic acids.

[0538] Microemulsions of the present disclosure may also contain additional components and additives such as sorbitan monostearate (Grill 3), Labrasol, and penetration enhancers to improve the properties of the formulation and to enhance the absorption of the iRNAs and nucleic acids of the present disclosure. Penetration enhancers used in the microemulsions of the present disclosure may be classified as belonging to one of five broad categories--surfactants, fatty acids, bile salts, chelating agents, and non-chelating non-surfactants (Lee et al., Critical Reviews in Therapeutic Drug Carrier Systems, 1991, p. 92). Each of these classes has been discussed above.

### Penetration Enhancers

[0539] In some embodiments, the present disclosure employs various penetration enhancers to effect the efficient delivery of nucleic acids, particularly iRNAs, to the skin of animals. Most drugs are present in solution in both ionized and nonionized forms. However, usually only lipid soluble or lipophilic drugs readily cross cell membranes. It has been discovered that even non-lipophilic drugs may cross cell membranes if the membrane to be crossed is treated with a penetration enhancer. In addition to aiding the diffusion of non-lipophilic drugs across cell membranes, penetration enhancers also enhance the permeability of lipophilic drugs.

[0540] Penetration enhancers may be classified as belonging to one of five broad categories, i.e., surfactants, fatty acids, bile salts, chelating agents, and non-chelating non-surfactants (see e.g., Malmsten, M. Surfactants and polymers in drug delivery, Informa Health Care, New York, NY, 2002; Lee et al., Critical Reviews in Therapeutic Drug Carrier Systems, 1991, p.92). Each of the above-mentioned classes of penetration enhancers are described below in greater detail.

[0541] Surfactants: In connection with the present disclosure, surfactants (or “surface-active agents”) are chemical entities which, when dissolved in an aqueous solution, reduce the surface tension of the solution or the interfacial tension between the aqueous solution and another liquid, with the result that absorption of iRNAs through the mucosa is enhanced. In addition to bile salts and fatty acids, these penetration enhancers include, for example, sodium lauryl sulfate, polyoxyethylene-9-lauryl ether and polyoxyethylene-20-cetyl ether) (see e.g., Malmsten, M. Surfactants and polymers in drug delivery, Informa Health Care, New York, NY, 2002; Lee et al., Critical Reviews in Therapeutic Drug Carrier Systems, 1991, p.92); and perfluorochemical emulsions, such as FC-43. Takahashi et al., J. Pharm. Pharmacol., 1988, 40, 252).

[0542] Fatty acids: Various fatty acids and their derivatives which act as penetration enhancers include, for example, oleic acid, lauric acid, capric acid (n-decanoic acid), myristic acid, palmitic acid, stearic acid, linoleic acid, linolenic acid, dicaprate, tricaprate, monoolein (1-monooleoyl-rac-glycerol), dilaurin, caprylic acid, arachidonic acid, glycerol 1-monocaprate, 1-dodecylazacycloheptan-2-one, acylcarnitines, acylcholines, C₁₋₂₀ alkyl esters thereof (e.g., methyl, isopropyl and t-butyl), and mono- and di-glycerides thereof (i.e., oleate, laurate, caprate, myristate, palmitate, stearate, linoleate, etc.) (see e.g., Touitou, E., et al. Enhancement in Drug Delivery, CRC Press, Danvers, MA, 2006; Lee et al., Critical Reviews in Therapeutic Drug Carrier Systems, 1991, p.92; Muranishi, Critical Reviews in Therapeutic Drug Carrier Systems, 1990, 7, 1-33; El Hariri et al., J. Pharm. Pharmacol., 1992, 44, 651-654).

[0543] Bile salts: The physiological role of bile includes the facilitation of dispersion and absorption of lipids and fat-soluble vitamins (see e.g., Malmsten, M. Surfactants and polymers in drug delivery, Informa Health Care, New York, NY, 2002; Brunton, Chapter 38 in: Goodman & Gilman’s The Pharmacological Basis of Therapeutics, 9th Ed., Hardman et al. Eds., McGraw-Hill, New York, 1996, pp. 934-935). Various natural bile salts, and their synthetic derivatives, act as penetration enhancers. Thus, the term “bile salts” includes any of the naturally occurring components of bile as well as any of their synthetic derivatives. Suitable bile salts include, for example, cholic acid (or its pharmaceutically acceptable sodium salt, sodium cholate), dehydrocholic acid (sodium dehydrocholate), deoxycholic acid (sodium deoxycholate), glucholic acid (sodium glucholate), glycholic acid (sodium glycocholate), glycodeoxycholic acid (sodium glycodeoxycholate), taurocholic acid (sodium taurocholate), taurodeoxycholic acid (sodium taurodeoxycholate), chenodeoxycholic acid (sodium chenodeoxycholate), ursodeoxycholic acid (UDCA), sodium tauro-24, 25-dihydro-fusidate (STDHF), sodium glycodihydrofusidate and polyoxyethylene-9-lauryl ether (POE) (see e.g., Malmsten, M. Surfactants and polymers in drug delivery, Informa Health Care, New York, NY, 2002; Lee et al., Critical Reviews in Therapeutic Drug Carrier Systems, 1991, page 92; Swinyard, Chapter 39 In: Remington’s Pharmaceutical Sciences, 18th Ed., Gennaro, ed., Mack Publishing Co., Easton, Pa., 1990, pages 782-783; Muranishi, Critical Reviews in Therapeutic Drug Carrier Systems, 1990, 7, 1-33; Yamamoto et al., J. Pharm. Exp. Ther., 1992, 263, 25; Yamashita et al., J. Pharm. Sci., 1990, 79, 579-583).

[0544] Chelating Agents: Chelating agents, as used in connection with the present disclosure, can be defined as compounds that remove metallic ions from solution by forming complexes therewith, with the result that absorption of iRNAs through the mucosa is enhanced. With regards to their use as penetration enhancers in the present disclosure, chelating agents have the added advantage of also serving as DNase inhibitors, as most characterized DNA nucleases require a divalent metal ion for catalysis and are thus inhibited by chelating agents (Jarrett, J. Chromatogr., 1993, 618, 315-339). Suitable chelating agents include but are not limited to disodium ethylenediaminetetraacetate (EDTA), citric acid, salicylates (e.g., sodium salicylate, 5-methoxysalicylate and homovanilate), N-acyl derivatives of collagen, laureth-9 and N-amino acyl derivatives of β-diketones (enamines)(see e.g., Katdare, A. et al., Excipient development for pharmaceutical, biotechnology, and drug delivery, CRC Press, Danvers, MA, 2006; Lee et al., Critical Reviews in Therapeutic Drug Carrier Systems, 1991, page 92; Muranishi, Critical Reviews in Therapeutic Drug Carrier Systems, 1990, 7, 1-33; Buur et al., J. Control Rel., 1990, 14, 43-51).

[0545] Non-chelating non-surfactants: As used herein, non-chelating non-surfactant penetration enhancing compounds can be defined as compounds that demonstrate insignificant activity as chelating agents or as surfactants but that nonetheless enhance absorption of iRNAs through the alimentary mucosa (see e.g., Muranishi, Critical Reviews in Therapeutic Drug Carrier Systems, 1990, 7, 1-33). This class of penetration enhancers include, for example, unsaturated cyclic ureas, 1-alkyl- and 1-alkenylazacyclo-alkanone derivatives (Lee et al., Critical Reviews in Therapeutic Drug Carrier Systems, 1991, page 92); and non-steroidal anti-inflammatory agents such as diclofenac sodium, indomethacin and phenylbutazone (Yamashita et al., J. Pharm. Pharmacol., 1987, 39, 621-626).

[0546] Agents that enhance uptake of iRNAs at the cellular level may also be added to the pharmaceutical and other compositions of the present disclosure. For example, cationic lipids, such as lipofectin (Junichi et al, U.S. Pat. No. 5,705,188), cationic glycerol derivatives, and polycationic molecules, such as polylysine (Lollo et al., PCT Application WO 97/30731), are also known to enhance the cellular uptake of dsRNAs. Examples of commercially available transfection reagents include, for example Lipofectamine™ (Invitrogen; Carlsbad, CA), Lipofectamine 2000™ (Invitrogen; Carlsbad, CA), 293fectin™ (Invitrogen; Carlsbad, CA), Cellfectin™ (Invitrogen; Carlsbad, CA), DMRIE-C™ (Invitrogen; Carlsbad, CA), FreeStyle™ MAX (Invitrogen; Carlsbad, CA), Lipofectamine™ 2000 CD (Invitrogen; Carlsbad, CA), Lipofectamine™ (Invitrogen; Carlsbad, CA), RNAiMAX (Invitrogen; Carlsbad, CA), Oligofectamine™ (Invitrogen; Carlsbad, CA), Optifect™ (Invitrogen; Carlsbad, CA), X-tremeGENE Q2 Transfection Reagent (Roche; Grenzacherstrasse, Switzerland), DOTAP Liposomal Transfection Reagent (Grenzacherstrasse, Switzerland), DOSPER Liposomal Transfection Reagent (Grenzacherstrasse, Switzerland), or Fugene (Grenzacherstrasse, Switzerland), Transfectam® Reagent (Promega; Madison, WI), TransFast™ Transfection Reagent (Promega; Madison, WI), Tfx™-20 Reagent (Promega; Madison, WI), Tfx™-50 Reagent (Promega; Madison, WI), DreamFect™ (OZ Biosciences; Marseille, France), EcoTransfect (OZ Biosciences; Marseille, France), TransPass^{a} D1 Transfection Reagent (New England Biolabs; Ipswich, MA, USA), LyoVec™/LipoGen™ (Invivogen; San Diego, CA, USA), PerFectin Transfection Reagent (Genlantis; San Diego, CA, USA), NeuroPORTER Transfection Reagent (Genlantis; San Diego, CA, USA), GenePORTER Transfection reagent (Genlantis; San Diego, CA, USA), GenePORTER 2 Transfection reagent (Genlantis; San Diego, CA, USA), Cytofectin Transfection Reagent (Genlantis; San Diego, CA, USA), BaculoPORTER Transfection Reagent (Genlantis; San Diego, CA, USA), TroganPORTER™ transfection Reagent (Genlantis; San Diego, CA, USA ), RiboFect (Bioline; Taunton, MA, USA), PlasFect (Bioline; Taunton, MA, USA), UniFECTOR (B-Bridge International; Mountain View, CA, USA), SureFECTOR (B-Bridge International; Mountain View, CA, USA), or HiFect™ (B-Bridge International, Mountain View, CA, USA), among others.

[0547] Other agents may be utilized to enhance the penetration of the administered nucleic acids, including glycols such as ethylene glycol and propylene glycol, pyrrols such as 2-pyrrol, azones, and terpenes such as limonene and menthone.

### Carriers

[0548] Certain compositions of the present disclosure also incorporate carrier compounds in the formulation. As used herein, “carrier compound” can refer to a nucleic acid, or analog thereof, which is inert (i.e., does not possess biological activity per se) but is recognized as a nucleic acid by in vivo processes that reduce the bioavailability of a nucleic acid having biological activity by, for example, degrading the biologically active nucleic acid or promoting its removal from circulation. The coadministration of a nucleic acid and a carrier compound, typically with an excess of the latter substance, can result in a substantial reduction of the amount of nucleic acid recovered in the liver, kidney or other extracirculatory reservoirs, presumably due to competition between the carrier compound and the nucleic acid for a common receptor. For example, the recovery of a partially phosphorothioate dsRNA in hepatic tissue can be reduced when it is coadministered with polyinosinic acid, dextran sulfate, polycytidic acid or 4-acetamido-4′isothiocyano-stilbene-2,2′-disulfonic acid (Miyao et al., DsRNA Res. Dev., 1995, 5, 115-121; Takakura et al., DsRNA & Nucl. Acid Drug Dev., 1996, 6, 177-183).

### Excipients

[0549] In contrast to a carrier compound, a pharmaceutical carrier or excipient may comprise, e.g., a pharmaceutically acceptable solvent, suspending agent or any other pharmacologically inert vehicle for delivering one or more nucleic acids to an animal. The excipient may be liquid or solid and is selected, with the planned manner of administration in mind, so as to provide for the desired bulk, consistency, etc., when combined with a nucleic acid and the other components of a given pharmaceutical composition. Typical pharmaceutical carriers include, but are not limited to, binding agents (e.g., pregelatinized maize starch, polyvinylpyrrolidone or hydroxypropyl methylcellulose, etc.); fillers (e.g., lactose and other sugars, microcrystalline cellulose, pectin, gelatin, calcium sulfate, ethyl cellulose, polyacrylates or calcium hydrogen phosphate, etc.); lubricants (e.g., magnesium stearate, talc, silica, colloidal silicon dioxide, stearic acid, metallic stearates, hydrogenated vegetable oils, corn starch, polyethylene glycols, sodium benzoate, sodium acetate, etc.); disintegrants (e.g., starch, sodium starch glycolate, etc.); and wetting agents (e.g., sodium lauryl sulphate, etc).

[0550] Pharmaceutically acceptable organic or inorganic excipients suitable for non-parenteral administration which do not deleteriously react with nucleic acids can also be used to formulate the compositions of the present disclosure. Suitable pharmaceutically acceptable carriers include, but are not limited to, water, salt solutions, alcohols, polyethylene glycols, gelatin, lactose, amylose, magnesium stearate, talc, silicic acid, viscous paraffin, hydroxymethylcellulose, polyvinylpyrrolidone and the like.

[0551] Formulations for topical administration of nucleic acids may include sterile and non-sterile aqueous solutions, non-aqueous solutions in common solvents such as alcohols, or solutions of the nucleic acids in liquid or solid oil bases. The solutions may also contain buffers, diluents and other suitable additives. Pharmaceutically acceptable organic or inorganic excipients suitable for non-parenteral administration which do not deleteriously react with nucleic acids can be used.

[0552] Suitable pharmaceutically acceptable excipients include, but are not limited to, water, salt solutions, alcohol, polyethylene glycols, gelatin, lactose, amylose, magnesium stearate, talc, silicic acid, viscous paraffin, hydroxymethylcellulose, polyvinylpyrrolidone and the like.

### Other Components

[0553] The compositions of the present disclosure may additionally contain other adjunct components conventionally found in pharmaceutical compositions, e.g., at their art-established usage levels. Thus, for example, the compositions may contain additional, compatible, pharmaceutically-active materials such as, for example, antipruritics, astringents, local anesthetics or anti-inflammatory agents, or may contain additional materials useful in physically formulating various dosage forms of the compositions of the present disclosure, such as dyes, flavoring agents, preservatives, antioxidants, opacifiers, thickening agents and stabilizers. However, such materials, when added, should not unduly interfere with the biological activities of the components of the compositions of the present disclosure. The formulations can be sterilized and, if desired, mixed with auxiliary agents, e.g., lubricants, preservatives, stabilizers, wetting agents, emulsifiers, salts for influencing osmotic pressure, buffers, colorings, flavorings and/or aromatic substances and the like which do not deleteriously interact with the nucleic acid(s) of the formulation.

[0554] Aqueous suspensions may contain substances that increase the viscosity of the suspension including, for example, sodium carboxymethylcellulose, sorbitol and/or dextran. The suspension may also contain stabilizers.

[0555] In some embodiments, pharmaceutical compositions featured in the disclosure include (a) one or more iRNA compounds and (b) one or more biologic agents which function by a non-RNAi mechanism. Examples of such biologic agents include agents that interfere with an interaction of MYOC and at least one MYOC binding partner.

[0556] Toxicity and therapeutic efficacy of such compounds can be determined by standard pharmaceutical procedures in cell cultures or experimental animals, e.g., for determining the LD50 (the dose lethal to 50% of the population) and the ED50 (the dose therapeutically effective in 50% of the population). The dose ratio between toxic and therapeutic effects is the therapeutic index and it can be expressed as the ratio LD50/ED50. Compounds that exhibit high therapeutic indices are typical.

[0557] The data obtained from cell culture assays and animal studies can be used in formulating a range of dosage for use in humans. The dosage of compositions featured in the disclosure lies generally within a range of circulating concentrations that include the ED50 with little or no toxicity. The dosage may vary within this range depending upon the dosage form employed and the route of administration utilized. For any compound used in the methods featured in the disclosure, the therapeutically effective dose can be estimated initially from cell culture assays. A dose may be formulated in animal models to achieve a circulating plasma concentration range of the compound or, when appropriate, of the polypeptide product of a target sequence (e.g., achieving a decreased concentration of the polypeptide) that includes the IC50 (i.e., the concentration of the test compound which achieves a half-maximal inhibition of symptoms) as determined in cell culture. Such information can be used to more accurately determine useful doses in humans. Levels in plasma may be measured, for example, by high performance liquid chromatography.

[0558] In addition to their administration, as discussed above, the iRNAs featured in the disclosure can be administered in combination with other known agents effective in treatment of diseases or disorders related to MYOC expression (e.g., glaucoma, e.g., primary open angle glaucoma (POAG)). In any event, the administering physician can adjust the amount and timing of iRNA administration on the basis of results observed using standard measures of efficacy known in the art or described herein.

### Methods of Treating Disorders Related to Expression of MYOC

[0559] The present disclosure relates to the use of an iRNA targeting MYOC to inhibit MYOC expression and/or to treat a disease, disorder, or pathological process that is related to MYOC expression (e.g., glaucoma, e.g., primary open angle glaucoma (POAG)).

[0560] In some aspects, a method of treatment of a disorder related to expression of MYOC is provided, the method comprising administering an iRNA (e.g., a dsRNA) disclosed herein to a subject in need thereof. In some embodiments, the iRNA inhibits (decreases) MYOC expression.

[0561] In some embodiments, the subject is an animal that serves as a model for a disorder related to MYOC expression, e.g., glaucoma, e.g., primary open angle glaucoma (POAG)..

### Glaucoma

[0562] In some embodiments, the disorder related to MYOC expression is glaucoma. A non-limiting example of glaucoma that is treatable using the method described herein includes primary open angle glaucoma (POAG).

[0563] Clinical and pathological features of glaucoma include, but are not limited to, vision loss, a reduction in visual acuity (e.g., halos around lights and blurriness) ) and decreased leakage of aqueous humor from the eye.

[0564] In some embodiments, the subject with glaucoma is less than 18 years old. In some embodiments, the subject with glaucoma is an adult. In some embodiments, the subject with glaucoma is more than 60 years old. In some embodiments, the subject has, or is identified as having, elevated levels of MYOC mRNA or protein relative to a reference level (e.g., a level of MYOC that is greater than a reference level).

[0565] In some embodiments, glaucoma is diagnosed using analysis of a sample from the subject (e.g., an aqueous ocular fluid sample). In some embodiments, the sample is analyzed using a method selected from one or more of: fluorescent in situ hybridization (FISH), immunohistochemistry, MYOC immunoassay, electron microscopy, laser microdissection, and mass spectrometry. In some embodiments,glaucoma is diagnosed using any suitable diagnostic test or technique, e.g., Goldmann Applanation Tonometry, measurement of central corneal thickness (CCT), automated static threshold perimetry (e.g. Humphrey field analysis), Van Herick technique, gonioscopy, ultrasound biomicroscopy and anterior segment optical coherence tomography (AS-OCT), angiography (e.g., fluorescein angiography or indocyanine green angiography), electroretinography, ultrasonography, pachymetry, optical coherence tomography (OCT), computed tomography (CT) and magnetic resonance imaging (MRI), tonometry, color vision testing, visual field testing, slit-lamp examination, ophthalmoscopy, and physical examination (e.g., to assess visual acuity (e.g., by fundoscopy or optical coherence tomography (OCT)).

### Combination Therapies

[0566] In some embodiments, an iRNA (e.g., a dsRNA) disclosed herein is administered in combination with a second therapy (e.g., one or more additional therapies) known to be effective in treating a disorder related to MYOC expression (glaucoma, e.g., primary open angle glaucoma (POAG)) or a symptom of such a disorder. The iRNA may be administered before, after, or concurrent with the second therapy. In some embodiments, the iRNA is administered before the second therapy. In some embodiments, the iRNA is administered after the second therapy. In some embodiments, the iRNA is administered concurrent with the second therapy.

[0567] The second therapy may be an additional therapeutic agent. The iRNA and the additional therapeutic agent can be administered in combination in the same composition or the additional therapeutic agent can be administered as part of a separate composition.

[0568] In some embodiments, the second therapy is a non-iRNA therapeutic agent that is effective to treat the disorder or symptoms of the disorder.

[0569] In some embodiments, the iRNA is administered in conjunction with a therapy.

[0570] Exemplary combination therapies include, but are not limited to, laser trabeculoplasty surgery, trabeculectomy surgery, a minimally invasive glaucoma surgery, placement of a drainage tube in the eye, oral medication or eye drops..

### Administration Dosages, Routes, and Timing

[0571] A subject (e.g., a human subject, e.g., a patient) can be administered a therapeutic amount of iRNA. The therapeutic amount can be, e.g., 0.05-50 mg/kg.

[0572] In some embodiments, the iRNA is formulated for delivery to a target organ, e.g., to the eye.

[0573] In some embodiments, the iRNA is formulated as a lipid formulation, e.g., an LNP formulation as described herein. In some such embodiments, the therapeutic amount is 0.05-5 mg/kg dsRNA. In some embodiments, the lipid formulation, e.g., LNP formulation, is administered intravenously.

[0574] In some embodiments, the iRNA is in the form of a GalNAc conjugate e.g., as described herein. In some such embodiments, the therapeutic amount is 0.5-50 mg dsRNA. In some embodiments, the e.g., GalNAc conjugate is administered subcutaneously.

[0575] In some embodiments, the administration is repeated, for example, on a regular basis, such as, daily, biweekly (i.e., every two weeks) for one month, two months, three months, four months, six months or longer. After an initial treatment regimen, the treatments can be administered on a less frequent basis. For example, after administration biweekly for three months, administration can be repeated once per month, for six months or a year or longer.

[0576] In some embodiments, the iRNA agent is administered in two or more doses. In some embodiments, the number or amount of subsequent doses is dependent on the achievement of a desired effect, e.g., to(a) inhibit or reduce the expression or activity of MYOC; (b) reduce the level of misfolded MYOC protein; (c) reduce trabecular meshwork cell death; (d) decrease intraocular pressure; or (e) increase visual acuity, or the achievement of a therapeutic or prophylactic effect, e.g., reduction or prevention of one or more symptoms associated with the disorder.

[0577] In some embodiments, the iRNA agent is administered according to a schedule. For example, the iRNA agent may be administered once per week, twice per week, three times per week, four times per week, or five times per week. In some embodiments, the schedule involves regularly spaced administrations, e.g., hourly, every four hours, every six hours, every eight hours, every twelve hours, daily, every 2 days, every 3 days, every 4 days, every 5 days, weekly, biweekly, or monthly. In some embodiments, the iRNA agent is administered at the frequency required to achieve a desired effect.

[0578] In some embodiments, the schedule involves closely spaced administrations followed by a longer period of time during which the agent is not administered. For example, the schedule may involve an initial set of doses that are administered in a relatively short period of time (e.g., about every 6 hours, about every 12 hours, about every 24 hours, about every 48 hours, or about every 72 hours) followed by a longer time period (e.g., about 1 week, about 2 weeks, about 3 weeks, about 4 weeks, about 5 weeks, about 6 weeks, about 7 weeks, or about 8 weeks) during which the iRNA agent is not administered. In some embodiments, the iRNA agent is initially administered hourly and is later administered at a longer interval (e.g., daily, weekly, biweekly, or monthly). In some embodiments, the iRNA agent is initially administered daily and is later administered at a longer interval (e.g., weekly, biweekly, or monthly). In certain embodiments, the longer interval increases over time or is determined based on the achievement of a desired effect.

[0579] Before administration of a full dose of the iRNA, patients can be administered a smaller dose, such as a 5% infusion dose, and monitored for adverse effects, such as an allergic reaction, or for elevated lipid levels or blood pressure. In another example, the patient can be monitored for unwanted effects.

### Methods for Modulating Expression of MYOC

[0580] In some aspects, the disclosure provides a method for modulating (e.g., inhibiting or activating) the expression of MYOC, e.g., in a cell, in a tissue, or in a subject. In some embodiments, the cell or tissue is ex vivo, in vitro, or in vivo. In some embodiments, the cell or tissue is in the eye (e.g., a trabecular meshwork tissue, a ciliary body, a retinal pigment epithelium (RPE), a retinal tissue, an astrocyte, a pericyte, a Müller cell, a ganglion cell, an endothelial cell, a photoreceptor cell, a retinal blood vessel (e.g., including endothelial cells and vascular smooth muscle cells), or choroid tissue, e.g., a choroid vessel). In some embodiments, the cell or tissue is in a subject (e.g., a mammal, such as, for example, a human). In some embodiments, the subject (e.g., the human) is at risk, or is diagnosed with a disorder related to expression of MYOC expression, as described herein.

[0581] In some embodiments, the method includes contacting the cell with an iRNA as described herein, in an amount effective to decrease the expression of MYOC in the cell. In some embodiments, contacting a cell with an RNAi agent includes contacting a cell in vitro with the RNAi agent or contacting a cell in vivo with the RNAi agent. In some embodiments, the RNAi agent is put into physical contact with the cell by the individual performing the method, or the RNAi agent may be put into a situation that will permit or cause it to subsequently come into contact with the cell. Contacting a cell in vitro may be done, for example, by incubating the cell with the RNAi agent. Contacting a cell in vivo may be done, for example, by injecting the RNAi agent into or near the tissue where the cell is located, or by injecting the RNAi agent into another area, e.g., ocular tissue. For example, the RNAi agent may contain or be coupled to a ligand, e.g., a lipophilic moiety or moieties as described below and further detailed, e.g., in PCT/US2019/031170 which is incorporated herein by reference in its entirety, including the passages therein describing lipophilic moieties, that directs or otherwise stabilizes the RNAi agent at a site of interest. Combinations of in vitro and in vivo methods of contacting are also possible. For example, a cell may also be contacted in vitro with an RNAi agent and subsequently transplanted into a subject.

[0582] The expression of MYOC may be assessed based on the level of expression of MYOC mRNA, MYOC protein, or the level of another parameter functionally linked to the level of expression of MYOC. In some embodiments, the expression of MYOC is inhibited by at least 5%, at least 10%, at least 15%, at least 20%, at least 25%, at least 30%, at least 35%, at least 40%, at least 45%, at least 50%, at least 55%, at least 60%, at least 65%, at least 70%, at least 75%, at least 80%, at least 85%, at least 90%, or at least 95%. In some embodiments, the iRNA has an IC₅₀ in the range of 0.001-0.01 nM, 0.001-0.10 nM, 0.001-1.0 nM, 0.001-10 nM, 0.01-0.05 nM, 0.01-0.50 nM, 0.02-0.60 nM, 0.01-1.0 nM, 0.01-1.5 nM, 0.01-10 nM. The IC₅₀ value may be normalized relative to an appropriate control value, e.g., the IC₅₀ of a non-targeting iRNA.

[0583] In some embodiments, the method includes introducing into the cell or tissue an iRNA as described herein and maintaining the cell or tissue for a time sufficient to obtain degradation of the mRNA transcript of MYOC, thereby inhibiting the expression of MYOC in the cell or tissue.

[0584] In some embodiments, the method includes administering a composition described herein, e.g., a composition comprising an iRNA that binds MYOC, to the mammal such that expression of the target MYOC is decreased, such as for an extended duration, e.g., at least two, three, four days or more, e.g., one week, two weeks, three weeks, or four weeks or longer. In some embodiments, the decrease in expression of MYOC is detectable within 1 hour, 2 hours, 4 hours, 8 hours, 12 hours, or 24 hours of the first administration.

[0585] In some embodiments, the method includes administering a composition as described herein to a mammal such that expression of the target MYOC is increased by e.g., at least 10% compared to an untreated animal. In some embodiments, the activation of MYOC occurs over an extended duration, e.g., at least two, three, four days or more, e.g., one week, two weeks, three weeks, four weeks, or more. Without wishing to be bound by theory, an iRNA can activate MYOC expression by stabilizing the MYOC mRNA transcript, interacting with a promoter in the genome, or inhibiting an inhibitor of MYOC expression.

[0586] The iRNAs useful for the methods and compositions featured in the disclosure specifically target RNAs (primary or processed) of MYOC. Compositions and methods for inhibiting the expression of MYOC using iRNAs can be prepared and performed as described elsewhere herein.

[0587] In some embodiments, the method includes administering a composition containing an iRNA, where the iRNA includes a nucleotide sequence that is complementary to at least a part of an RNA transcript of MYOC of the subject, e.g., the mammal, e.g., the human, to be treated. The composition may be administered by any appropriate means known in the art including, but not limited to ocular (e.g., intraocular), topical, and intravenous administration.

[0588] In certain embodiments, the composition is administered intraocularly (e.g., by intravitreal administration, e.g., intravitreal injection; transscleral administration, e.g., transscleral injection; subconjunctival administration, e.g., subconjunctival injection; retrobulbar administration, e.g., retrobulbar injection; intracameral administration, e.g., intracameral injection; or subretinal administration, e.g., subretinal injection. In other embodiments, the composition is administered topically. In other embodiments, the composition is administered by intravenous infusion or injection.

[0589] In certain embodiments, the composition is administered by intravenous infusion or injection. In some such embodiments, the composition comprises a lipid formulated siRNA (e.g., an LNP formulation, such as an LNP11 formulation) for intravenous infusion.

[0590] Unless otherwise defined, all technical and scientific terms used herein have the same meaning as commonly understood by one of ordinary skill in the art to which this disclosure belongs. Although methods and materials similar or equivalent to those described herein can be used in the practice or testing of the iRNAs and methods featured in the disclosure, suitable methods and materials are described below. All publications, patent applications, patents, and other references mentioned herein are incorporated by reference in their entirety. In case of conflict, the present specification, including definitions, will control. In addition, the materials, methods, and examples are illustrative only and not intended to be limiting.

### SPECIFIC EMBODIMENTS

[0591] 1. A double stranded ribonucleic acid (dsRNA) agent for inhibiting expression of myocilin (MYOC), wherein the dsRNA agent comprises a sense strand and an antisense strand forming a double stranded region, wherein the sense strand comprises a nucleotide sequence comprising at least 15 contiguous nucleotides, with 0, 1, 2, or 3 mismatches, of a portion of a coding strand of human MYOC and the antisense strand comprises a nucleotide sequence comprising at least 15 contiguous nucleotides, with 0, 1, 2, or 3 mismatches, of the corresponding portion of a non-coding strand of human MYOC such that the sense strand is complementary to the at least 15 contiguous nucleotides in the antisense strand.

[0592] 2. The dsRNA agent of embodiment 1, wherein the coding strand of human MYOC comprises the sequence SEQ ID NO: 1.

[0593] 3. The dsRNA agent of embodiment 1 or 2, wherein the non-coding strand of human MYOC comprises the sequence of SEQ ID NO: 2.

[0594] 4. A double stranded ribonucleic acid (dsRNA) agent for inhibiting expression of MYOC, wherein the dsRNA agent comprises a sense strand and an antisense strand forming a double stranded region, wherein the antisense strand comprises a nucleotide sequence comprising at least 15 contiguous nucleotides, with 0, 1, 2, or 3 mismatches, of a portion of nucleotide sequence of SEQ ID NO: 2 such that the sense strand is complementary to the at least 15 contiguous nucleotides in the antisense strand.

[0595] 5. The dsRNA agent of embodiment 4, wherein the sense strand comprises a nucleotide sequence comprising at least 15 contiguous nucleotides, with 0, or 1, 2, or 3 mismatches, of the corresponding portion of the nucleotide sequence of SEQ ID NO: 1.

[0596] 6. The dsRNA of any of the preceding embodiments, wherein the dsRNA agent comprises a sense strand and an antisense strand, wherein the antisense strand comprises a nucleotide sequence comprising at least 17 contiguous nucleotides, with 0, 1, 2, or 3 mismatches, of a portion of nucleotide sequence of SEQ ID NO: 2 such that the sense strand is complementary to the at least 17 contiguous nucleotides in the antisense strand.

[0597] 7. The dsRNA of embodiment 6, wherein the sense strand comprises a nucleotide sequence comprising at least 17 contiguous nucleotides, with 0, or 1, 2, or 3 mismatches, of the corresponding portion of the nucleotide sequence of SEQ ID NO: 1.

[0598] 8. The dsRNA of any of the preceding embodiments, wherein the dsRNA agent comprises a sense strand and an antisense strand, wherein the antisense strand comprises a nucleotide sequence comprising at least 19 contiguous nucleotides, with 0, 1, 2, or 3 mismatches, of a portion of nucleotide sequence of SEQ ID NO: 2 such that the sense strand is complementary to the at least 19 contiguous nucleotides in the antisense strand.

[0599] 9. The dsRNA of embodiment 8, wherein the sense strand comprises a nucleotide sequence comprising at least 19 contiguous nucleotides, with 0, 1, 2, or 3 mismatches, of the corresponding portion of the nucleotide sequence of SEQ ID NO: 1.

[0600] 10. The dsRNA of any of the preceding embodiments, wherein the dsRNA agent comprises a sense strand and an antisense strand, wherein the antisense strand comprises a nucleotide sequence comprising at least 21 contiguous nucleotides, with 0, 1, 2, or 3 mismatches, of a portion of nucleotide sequence of SEQ ID NO: 2 such that the sense strand is complementary to the at least 21 contiguous nucleotides in the antisense strand.

[0601] 11. The dsRNA of embodiment 10, wherein the sense strand comprises a nucleotide sequence comprising at least 21 contiguous nucleotides, with 0, or 1, 2, or 3 mismatches, of the corresponding portion of the nucleotide sequence of SEQ ID NO: 1.

[0602] 12. The dsRNA agent of any one of the preceding embodiments, wherein the portion of the sense strand is a portion within a sense strand in any one of Tables 2A, 2B, 3A, 3B, 4A, 4B, 5A, and 5B.

[0603] 13. The dsRNA agent of any one of the preceding embodiments, wherein the portion of the antisense strand is a portion within an antisense strand in any one of Tables 2A, 2B, 3A, 3B, 4A, 4B, 5A, and 5B.

[0604] 14. The dsRNA agent of any of the preceding embodiments, wherein the antisense strand comprises a nucleotide sequence comprising at least 15 contiguous nucleotides, with 0, 1, 2, or 3 mismatches, from one of the antisense sequences listed in any one of Tables 2A, 2B, 3A, 3B, 4A, 4B, 5A, and 5B.

[0605] 15. The dsRNA agent of any of the preceding embodiments, wherein the sense strand comprises a nucleotide sequence comprising at least 15 contiguous nucleotides, with 0, 1, 2, or 3 mismatches, from a sense sequence listed in any one of Tables 2A, 2B, 3A, 3B, 4A, 4B, 5A, and 5B that corresponds to the antisense sequence.

[0606] 16. The dsRNA agent of any of the preceding embodiments, wherein the antisense strand comprises a nucleotide sequence comprising at least 17 contiguous nucleotides, with 0, 1, 2, or 3 mismatches, from one of the antisense sequences listed in any one of Tables 2A, 2B, 3A, 3B, 4A, 4B, 5A, and 5B.

[0607] 17. The dsRNA agent of any of the preceding embodiments, wherein the sense strand comprises a nucleotide sequence comprising at least 17 contiguous nucleotides, with 0, 1, 2, or 3 mismatches, from a sense sequence listed in any one of Tables 2A, 2B, 3A, 3B, 4A, 4B, 5A, and 5B that corresponds to the antisense sequence.

[0608] 18. The dsRNA agent of any of the preceding embodiments, wherein the antisense strand comprises a nucleotide sequence comprising at least 19 contiguous nucleotides, with 0, 1, 2, or 3 mismatches, from one of the antisense sequences listed in any one of Tables 2A, 2B, 3A, 3B, 4A, 4B, 5A, and 5B.

[0609] 19. The dsRNA agent of any of the preceding embodiments, wherein the sense strand comprises a nucleotide sequence comprising at least 19 contiguous nucleotides, with 0, 1, 2, or 3 mismatches, from a sense sequence listed in any one of Tables 2A, 2B, 3A, 3B, 4A, 4B, 5A, and 5B that corresponds to the antisense sequence.

[0610] 20. The dsRNA agent of any of the preceding embodiments, wherein the antisense strand comprises a nucleotide sequence comprising at least 21 contiguous nucleotides, with 0, 1, 2, or 3 mismatches, from one of the antisense sequences listed in any one of Tables 2A, 2B, 3A, 3B, 4A, 4B, 5A, and 5B.

[0611] 21. The dsRNA agent of any of the preceding embodiments, wherein the sense strand comprises a nucleotide sequence comprising at least 21 contiguous nucleotides, with 0, 1, 2, or 3 mismatches, from a sense sequence listed in any one of Tables 2A, 2B, 3A, 3B, 4A, 4B, 5A, and 5B that corresponds to the antisense sequence.

[0612] 22. The dsRNA agent of any of the preceding embodiments, wherein the sense strand is at least 23 nucleotides in length, e.g., 23-30 nucleotides in length.

[0613] 23. The dsRNA agent of any of the preceding embodiments, wherein at least one of the sense strand and the antisense strand is conjugated to one or more lipophilic moieties.

[0614] 24. The dsRNA agent of embodiment 23, wherein the lipophilic moiety is conjugated to one or more positions in the double stranded region of the dsRNA agent.

[0615] 25. The dsRNA agent of embodiment 23 or 24, wherein the lipophilic moiety is conjugated via a linker or carrier.

[0616] 26. The dsRNA agent of any one of embodiments 23-25, wherein lipophilicity of the lipophilic moiety, measured by logKow, exceeds 0.

[0617] 27. The dsRNA agent of any one of the preceding embodiments, wherein the hydrophobicity of the double-stranded RNAi agent, measured by the unbound fraction in a plasma protein binding assay of the double-stranded RNAi agent, exceeds 0.2.

[0618] 28. The dsRNA agent of embodiment 27, wherein the plasma protein binding assay is an electrophoretic mobility shift assay using human serum albumin protein.

[0619] 29. The dsRNA agent of any of the preceding embodiments, wherein the dsRNA agent comprises at least one modified nucleotide.

[0620] 30. The dsRNA agent of embodiment 29, wherein no more than five of the sense strand nucleotides and not more than five of the nucleotides of the antisense strand are unmodified nucleotides.

[0621] 31. The dsRNA agent of embodiment 29, wherein all of the nucleotides of the sense strand and all of the nucleotides of the antisense strand comprise a modification.

[0622] 32. The dsRNA agent of any one of embodiments 29-31, wherein at least one of the modified nucleotides is selected from the group consisting of a deoxy-nucleotide, a 3′-terminal deoxy-thymine (dT) nucleotide, a 2′-O-methyl modified nucleotide, a 2′-fluoro modified nucleotide, a 2′-deoxy-modified nucleotide, a locked nucleotide, an unlocked nucleotide, a conformationally restricted nucleotide, a constrained ethyl nucleotide, an abasic nucleotide, a 2′-amino-modified nucleotide, a 2′-O-allyl-modified nucleotide, 2′-C-alkyl-modified nucleotide, a 2′-methoxyethyl modified nucleotide, a 2′-O-alkyl-modified nucleotide, a morpholino nucleotide, a phosphoramidate, a non-natural base comprising nucleotide, a tetrahydropyran modified nucleotide, a 1,5-anhydrohexitol modified nucleotide, a cyclohexenyl modified nucleotide, a nucleotide comprising a phosphorothioate group, a nucleotide comprising a methylphosphonate group, a nucleotide comprising a 5′-phosphate, a nucleotide comprising a 5′-phosphate mimic, a glycol modified nucleotide, and a 2-O-(N-methylacetamide) modified nucleotide; and combinations thereof.

[0623] 33. The dsRNA agent of any of embodiments 29-31, wherein no more than five of the sense strand nucleotides and not more than five of the nucleotides of the antisense strand include modifications other than 2′-O-methyl modified nucleotide, a 2′-fluoro modified nucleotide, a 2′-deoxy-modified nucleotide, unlocked nucleic acids (UNA) or glycerol nucleic acid (GNA).

[0624] 34. The dsRNA agent of any of the preceding embodiments, which comprises a non-nucleotide spacer (wherein optionally the non-nucleotide spacer comprises a C3-C6 alkyl) between two of the contiguous nucleotides of the sense strand or between two of the contiguous nucleotides of the antisense strand.

[0625] 35. The dsRNA agent of any of the preceding embodiments, wherein each strand is no more than 30 nucleotides in length.

[0626] 36. The dsRNA agent of any of the preceding embodiments, wherein at least one strand comprises a 3′ overhang of at least 1 nucleotide.

[0627] 37. The dsRNA agent of any of the preceding embodiments, wherein at least one strand comprises a 3′ overhang of at least 2 nucleotides.

[0628] 38. The dsRNA agent of any of the preceding embodiments, wherein the double stranded region is 15-30 nucleotide pairs in length.

[0629] 39. The dsRNA agent of embodiment 38, wherein the double stranded region is 17-23 nucleotide pairs in length.

[0630] 40. The dsRNA agent of embodiment 38, wherein the double stranded region is 17-25 nucleotide pairs in length.

[0631] 41. The dsRNA agent of embodiment 38, wherein the double stranded region is 23-27 nucleotide pairs in length.

[0632] 42. The dsRNA agent of embodiment 38, wherein the double stranded region is 19-21 nucleotide pairs in length.

[0633] 43. The dsRNA agent of embodiment 38, wherein the double stranded region is 21-23 nucleotide pairs in length.

[0634] 44. The dsRNA agent of any of the preceding embodiments, wherein each strand has 19-30 nucleotides.

[0635] 45. The dsRNA agent of any of the preceding embodiments, wherein each strand has 19-23 nucleotides.

[0636] 46. The dsRNA agent of any of the preceding embodiments, wherein each strand has 21-23 nucleotides.

[0637] 47. The dsRNA agent of any of the preceding embodiments, wherein the agent comprises at least one phosphorothioate or methylphosphonate internucleotide linkage.

[0638] 48. The dsRNA agent of embodiment 47, wherein the phosphorothioate or methylphosphonate internucleotide linkage is at the 3′-terminus of one strand.

[0639] 49. The dsRNA agent of embodiment 48, wherein the strand is the antisense strand.

[0640] 50. The dsRNA agent of embodiment 48, wherein the strand is the sense strand.

[0641] 51. The dsRNA agent of embodiment 47, wherein the phosphorothioate or methylphosphonate internucleotide linkage is at the 5′-terminus of one strand.

[0642] 52. The dsRNA agent of embodiment 51, wherein the strand is the antisense strand.

[0643] 53. The dsRNA agent of embodiment 51, wherein the strand is the sense strand.

[0644] 54. The dsRNA agent of embodiment 47, wherein each of the 5′- and 3′-terminus of one strand comprises a phosphorothioate or methylphosphonate internucleotide linkage.

[0645] 55. The dsRNA agent of embodiment 54, wherein the strand is the antisense strand.

[0646] 56. The dsRNA agent of any of the preceding embodiments, wherein the base pair at the 1 position of the 5′-end of the antisense strand of the duplex is an AU base pair.

[0647] 57. The dsRNA agent of embodiment 54, wherein the sense strand has a total of 21 nucleotides and the antisense strand has a total of 23 nucleotides.

[0648] 58. The dsRNA agent of any one of embodiments 23-57, wherein one or more lipophilic moieties are conjugated to one or more internal positions on at least one strand.

[0649] 59. The dsRNA agent of embodiment 58, wherein the one or more lipophilic moieties are conjugated to one or more internal positions on at least one strand via a linker or carrier.

[0650] 60. The dsRNA agent of embodiment 59, wherein the internal positions include all positions except the terminal two positions from each end of the at least one strand.

[0651] 61. The dsRNA agent of embodiment 59, wherein the internal positions include all positions except the terminal three positions from each end of the at least one strand.

[0652] 62. The dsRNA agent of any one of embodiments 59-61, wherein the internal positions exclude a cleavage site region of the sense strand.

[0653] 63. The dsRNA agent of embodiment 62, wherein the internal positions include all positions except positions 9-12, counting from the 5′-end of the sense strand.

[0654] 64. The dsRNA agent of embodiment 62, wherein the internal positions include all positions except positions 11-13, counting from the 3′-end of the sense strand.

[0655] 65. The dsRNA agent of any one of embodiments 59-61, wherein the internal positions exclude a cleavage site region of the antisense strand.

[0656] 66. The dsRNA agent of embodiment 65, wherein the internal positions include all positions except positions 12-14, counting from the 5′-end of the antisense strand.

[0657] 67. The dsRNA agent of any one of embodiments 59-61, wherein the internal positions include all positions except positions 11-13 on the sense strand, counting from the 3′-end, and positions 12-14 on the antisense strand, counting from the 5′-end.

[0658] 68. The dsRNA agent of any one of embodiments 23-67, wherein the one or more lipophilic moieties are conjugated to one or more of the internal positions selected from the group consisting of positions 4-8 and 13-18 on the sense strand, and positions 6-10 and 15-18 on the antisense strand, counting from the 5′end of each strand.

[0659] 69. The dsRNA agent of embodiment 68, wherein the one or more lipophilic moieties are conjugated to one or more of the internal positions selected from the group consisting of positions 5, 6, 7, 15, and 17 on the sense strand, and positions 15 and 17 on the antisense strand, counting from the 5′-end of each strand.

[0660] 70. The dsRNA agent of embodiment 24, wherein the positions in the double stranded region exclude a cleavage site region of the sense strand.

[0661] 71. The dsRNA agent of any one of embodiments 23-70, wherein the sense strand is 21 nucleotides in length, the antisense strand is 23 nucleotides in length, and the lipophilic moiety is conjugated to position 21, position 20, position 15, position 1, position 7, position 6, or position 2 of the sense strand or position 16 of the antisense strand.

[0662] 72. The dsRNA agent of embodiment 71, wherein the lipophilic moiety is conjugated to position 21, position 20, position 15, position 1, or position 7 of the sense strand.

[0663] 73. The dsRNA agent of embodiment 71, wherein the lipophilic moiety is conjugated to position 21, position 20, or position 15 of the sense strand.

[0664] 74. The dsRNA agent of embodiment 71, wherein the lipophilic moiety is conjugated to position 20 or position 15 of the sense strand.

[0665] 75. The dsRNA agent of embodiment 71, wherein the lipophilic moiety is conjugated to position 16 of the antisense strand.

[0666] 76. The dsRNA agent of embodiment 71, wherein the lipophilic moiety is conjugated to position 6, counting from the 5′-end of the sense strand.

[0667] 77. The dsRNA agent of any one of embodiments 23-76, wherein the lipophilic moiety is an aliphatic, alicyclic, or polyalicyclic compound.

[0668] 78. The dsRNA agent of embodiment 77, wherein the lipophilic moiety is selected from the group consisting of lipid, cholesterol, retinoic acid, cholic acid, adamantane acetic acid, 1-pyrene butyric acid, dihydrotestosterone, 1,3-bis-O(hexadecyl)glycerol, geranyloxyhexyanol, hexadecylglycerol, borneol, menthol, 1,3-propanediol, heptadecyl group, palmitic acid, myristic acid, O3-(oleoyl)lithocholic acid, O3-(oleoyl)cholenic acid, dimethoxytrityl, or phenoxazine.

[0669] 79. The dsRNA agent of embodiment 78, wherein the lipophilic moiety contains a saturated or unsaturated C4-C30 hydrocarbon chain, and an optional functional group selected from the group consisting of hydroxyl, amine, carboxylic acid, sulfonate, phosphate, thiol, azide, and alkyne.

[0670] 80. The dsRNA agent of embodiment 79, wherein the lipophilic moiety contains a saturated or unsaturated C6-C18 hydrocarbon chain.

[0671] 81. The dsRNA agent of embodiment 79, wherein the lipophilic moiety contains a saturated or unsaturated C16 hydrocarbon chain.

[0672] 82. The dsRNA agent of any one of embodiments 23-81, wherein the lipophilic moiety is conjugated via a carrier that replaces one or more nucleotide(s) in the internal position(s) or the double stranded region.

[0673] 83. The dsRNA agent of embodiment 82, wherein the carrier is a cyclic group selected from the group consisting of pyrrolidinyl, pyrazolinyl, pyrazolidinyl, imidazolinyl, imidazolidinyl, piperidinyl, piperazinyl, [1,3]dioxolanyl, oxazolidinyl, isoxazolidinyl, morpholinyl, thiazolidinyl, isothiazolidinyl, quinoxalinyl, pyridazinonyl, tetrahydrofuranyl, and decalinyl; or is an acyclic moiety based on a serinol backbone or a diethanolamine backbone.

[0674] 84. The dsRNA agent of any one of embodiments 23-81, wherein the lipophilic moiety is conjugated to the double-stranded iRNA agent via a linker containing an ether, thioether, urea, carbonate, amine, amide, maleimide-thioether, disulfide, phosphodiester, sulfonamide linkage, a product of a click reaction, or carbamate.

[0675] 85. The double-stranded iRNA agent of any one of embodiments 23-84, wherein the lipophilic moiety is conjugated to a nucleobase, sugar moiety, or internucleosidic linkage.

[0676] 86. The dsRNA agent of any one of embodiments 23-85, wherein the lipophilic moiety is conjugated via a bio-cleavable linker selected from the group consisting of DNA, RNA, disulfide, amide, functionalized monosaccharides or oligosaccharides of galactosamine, glucosamine, glucose, galactose, mannose, and combinations thereof.

[0677] 87. The dsRNA agent of any one of embodiments 23-86, wherein the 3′ end of the sense strand is protected via an end cap which is a cyclic group having an amine, said cyclic group being selected from the group consisting of pyrrolidinyl, pyrazolinyl, pyrazolidinyl, imidazolinyl, imidazolidinyl, piperidinyl, piperazinyl, [1,3]dioxolanyl, oxazolidinyl, isoxazolidinyl, morpholinyl, thiazolidinyl, isothiazolidinyl, quinoxalinyl, pyridazinonyl, tetrahydrofuranyl, and decalinyl.

[0678] 88. The dsRNA agent of any one of embodiments 23-87, further comprising a targeting ligand, e.g., a ligand that targets an ocular tissue or a liver tissue.

[0679] 89. The dsRNA agent of embodiment 88, wherein the ligand is conjugated to the sense strand.

[0680] 90. The dsRNA agent of embodiment 88 or 89, wherein the ligand is conjugated to the 3′ end or the 5′ end of the sense strand.

[0681] 91. The dsRNA agent of embodiment 88 or 89, wherein the ligand is conjugated to the 3′ end of the sense strand.

[0682] 92. The dsRNA agent of any one of embodiments 88-91, wherein the ocular tissue is a trabecular meshwork tissue, a ciliary body, a retinal tissue, a retinal pigment epithelium (RPE) or choroid tissue, e.g., a choroid vessel.

[0683] 93. The dsRNA agent of any one of embodiments 88-91, wherein the targeting ligand comprises N-acetylgalactosamine (GalNAc).

[0684] 94. The dsRNA agent of any one of embodiments 88-91, wherein the targeting ligand is one or more GalNAc conjugates or one or more or GalNAc derivatives.

[0685] 95. The dsRNA agent of embodiment 94, wherein the one or more GalNAc conjugates or one or more GalNAc derivatives are attached through a monovalent linker, or a bivalent, trivalent, or tetravalent branched linker.

[0686] 96. The dsRNA agent of embodiment 94, wherein the ligand is

[chemical structure]

[0687] 97. The dsRNA agent of embodiment 96, wherein the dsRNA agent is conjugated to the ligand as shown in the following schematic

[chemical structure]

wherein X is O or S.

[0688] 98. The dsRNA agent of embodiment 97, wherein the X is O.

[0689] 99. The dsRNA agent of any one of embodiments 1-98, further comprising a terminal, chiral modification occurring at the first internucleotide linkage at the 3′ end of the antisense strand, having the linkage phosphorus atom in Sp configuration,
[0690] a terminal, chiral modification occurring at the first internucleotide linkage at the 5′ end of the antisense strand, having the linkage phosphorus atom in Rp configuration, and
[0691] a terminal, chiral modification occurring at the first internucleotide linkage at the 5′ end of the sense strand, having the linkage phosphorus atom in either Rp configuration or Sp configuration.

[0692] 100. The dsRNA agent of any one of embodiments 1-98, further comprising
[0693] a terminal, chiral modification occurring at the first and second internucleotide linkages at the 3′ end of the antisense strand, having the linkage phosphorus atom in Sp configuration,
[0694] a terminal, chiral modification occurring at the first internucleotide linkage at the 5′ end of the antisense strand, having the linkage phosphorus atom in Rp configuration, and
[0695] a terminal, chiral modification occurring at the first internucleotide linkage at the 5′ end of the sense strand, having the linkage phosphorus atom in either Rp or Sp configuration.

[0696] 101. The dsRNA agent of any one of embodiments 1-98, further comprising
[0697] a terminal, chiral modification occurring at the first, second and third internucleotide linkages at the 3′ end of the antisense strand, having the linkage phosphorus atom in Sp configuration,
[0698] a terminal, chiral modification occurring at the first internucleotide linkage at the 5′ end of the antisense strand, having the linkage phosphorus atom in Rp configuration, and
[0699] a terminal, chiral modification occurring at the first internucleotide linkage at the 5′ end of the sense strand, having the linkage phosphorus atom in either Rp or Sp configuration.

[0700] 102. The dsRNA agent of any one of embodiments 1-98, further comprising
[0701] a terminal, chiral modification occurring at the first, and second internucleotide linkages at the 3′ end of the antisense strand, having the linkage phosphorus atom in Sp configuration,
[0702] a terminal, chiral modification occurring at the third internucleotide linkages at the 3′ end of the antisense strand, having the linkage phosphorus atom in Rp configuration,
[0703] a terminal, chiral modification occurring at the first internucleotide linkage at the 5′ end of the antisense strand, having the linkage phosphorus atom in Rp configuration, and
[0704] a terminal, chiral modification occurring at the first internucleotide linkage at the 5′ end of the sense strand, having the linkage phosphorus atom in either Rp or Sp configuration.

[0705] 103. The dsRNA agent of any one of embodiments 1-98, further comprising
[0706] a terminal, chiral modification occurring at the first, and second internucleotide linkages at the 3′ end of the antisense strand, having the linkage phosphorus atom in Sp configuration,
[0707] a terminal, chiral modification occurring at the first, and second internucleotide linkages at the 5′ end of the antisense strand, having the linkage phosphorus atom in Rp configuration, and
[0708] a terminal, chiral modification occurring at the first internucleotide linkage at the 5′ end of the sense strand, having the linkage phosphorus atom in either Rp or Sp configuration.

[0709] 104. The dsRNA agent of any one of embodiments 1-103, further comprising a phosphate or phosphate mimic at the 5′-end of the antisense strand.

[0710] 105. The dsRNA agent of embodiment 104, wherein the phosphate mimic is a 5′-vinyl phosphonate (VP).

[0711] 106. A cell containing the dsRNA agent of any one of embodiments 1-105.

[0712] 107. A human ocular cell, e.g., (a cell of the trabecular meshwork, a cell of the ciliary body, an RPE cell, an astrocyte, a pericyte, a Müller cell, a ganglion cell, an endothelial cell, or a photoreceptor cell) comprising a reduced level of MYOC mRNA or a level of MYOC protein as compared to an otherwise similar untreated cell, wherein optionally the level is reduced by at least 10%, 15%, 20%, 25%, 30%, 35%, 40%, 45%, 50%, 55%, 60%, 65%, 70%, 75%, 80%, 85%, 90%, or 95%.

[0713] 108. The human cell of embodiment 107, which was produced by a process comprising contacting a human cell with the dsRNA agent of any one of embodiments 1-94.

[0714] 109. A pharmaceutical composition for inhibiting expression of MYOC, comprising the dsRNA agent of any one of embodiments 1-105.

[0715] 110. A pharmaceutical composition comprising the dsRNA agent of any one of embodiments 1-105 and a lipid formulation.

[0716] 111. A method of inhibiting expression of MYOC in a cell, the method comprising:
[0717] (a) contacting the cell with the dsRNA agent of any one of embodiments 1-105, or a pharmaceutical composition of embodiment 109 or 110; and
[0718] (b) maintaining the cell produced in step (a) for a time sufficient to obtain degradation of the mRNA transcript of MYOC, thereby inhibiting expression of MYOC in the cell.

[0719] 112. A method of inhibiting expression of MYOC in a cell, the method comprising:
[0720] (a) contacting the cell with the dsRNA agent of any one of embodiments 1-105, or a pharmaceutical composition of embodiment 109 or 110; and
[0721] (b) maintaining the cell produced in step (a) for a time sufficient to reduce levels of MYOC mRNA, MYOC protein, or both of MYOC mRNA and protein, thereby inhibiting expression of MYOC in the cell.

[0722] 113. The method of embodiment 111 or 112, wherein the cell is within a subject.

[0723] 114. The method of embodiment 113, wherein the subject is a human.

[0724] 115. The method of any one of embodiments 111-114, wherein the level of MYOC mRNA is inhibited by at least 50%.

[0725] 116. The method of any one of embodiments 111-114, wherein the level of MYOC protein is inhibited by at least 50%.

[0726] 117. The method of embodiment 114-116, wherein inhibiting expression of MYOC decreases a MYOC protein level in a biological sample (e.g., an aqueous ocular fluid sample) from the subject by at least 30%, 40%, 50%, 60%, 70%, 80%, 90%, or 95%.

[0727] 118. The method of any one of embodiments 114-117, wherein the subject has been diagnosed with a MYOC-associated disorder, e.g., glaucoma, e.g., primary open angle glaucoma (POAG).

[0728] 119. A method of inhibiting expression of MYOC in an ocular cell or tissue, the method comprising:
[0729] (a) contacting the cell or tissue with a dsRNA agent that binds MYOC; and
[0730] (b) maintaining the cell or tissue produced in step (a) for a time sufficient to reduce levels of MYOC mRNA, MYOC protein, or both of MYOC mRNA and protein, thereby inhibiting expression of MYOC in the cell or tissue.

[0731] 120. The method of embodiment 119, wherein the ocular cell or tissue comprises a trabecular meshwork tissue, a ciliary body, an RPE cell, a retinal tissue, an astrocyte, a pericyte, a Müller cell, a ganglion cell, an endothelial cell, a photoreceptor cell, a retinal blood vessel (e.g., including endothelial cells and vascular smooth muscle cells), or choroid tissue, e.g., a choroid vessel.

[0732] 120a. A method of reducing intraocular pressure in a subject, comprising administering to the subject a therapeutically effective amount of the dsRNA agent of any one of embodiments 1-105 or a pharmaceutical composition of embodiment 109 or 110, thereby reducing intraocular pressure in the subject.

[0733] 120b. A method of limiting an increase in intraocular pressure, or maintaining a constant intraocular pressure, in a subject, comprising administering to the subject a therapeutically effective amount of the dsRNA agent of any one of embodiments 1-105 or a pharmaceutical composition of embodiment 109 or 110, thereby limiting the increase in intraocular pressure, or maintaining a constant intraocular pressure in the subject.

[0734] 121. A method of treating a subject having, or diagnosed with having, a MYOC-associated disorder comprising administering to the subject a therapeutically effective amount of the dsRNA agent of any one of embodiments 1-105 or a pharmaceutical composition of embodiment 109 or 110, thereby treating the disorder.

[0735] 122. The method of embodiment 118 or 121, wherein the MYOC-associated disorder is glaucoma.

[0736] 122a. A method of treating a subject having glaucoma, comprising administering to the subject a therapeutically effective amount of the dsRNA agent of any one of embodiments 1-105 or a pharmaceutical composition of embodiment 109 or 110, thereby treating the glaucoma.

[0737] 123. The method of embodiment 122 or 122a, wherein glaucoma is selected from the group consisting of primary open angle glaucoma (POAG).

[0738] 124. The method of any one of embodiments 121-123, wherein treating comprises amelioration of at least one sign or symptom of the disorder.

[0739] 125. The method of embodiment 124, wherein at least one sign or symptom of glaucoma comprises a measure of one or more of optic nerve damage, vision loss, tunnel vision, blurred vision, eye pain or presence, level, or activity of MYOC (e.g., MYOC gene, MYOC mRNA, or MYOC protein).

[0740] 126. The method of any one of embodiments 121-123, where treating comprises prevention of progression of the disorder.

[0741] 127. The method of any one of embodiments 124-126, wherein the treating comprises one or more of (a) inhibiting or reducing the expression or activity of MYOC; (b) reducing the level of misfolded MYOC protein; (c) reducing trabecular meshwork cell death; (d) decreasing intraocular pressure; or (e) increasing visual acuity.

[0742] 128. The method of embodiment 127, wherein the treating results in at least a 30% mean reduction from baseline of MYOC mRNA in the trabecular meshwork tissue, ciliary body, retina, RPE, a retinal blood vessel (e.g., including endothelial cells and vascular smooth muscle cells), or choroid tissue, e.g., a choroid vessel.

[0743] 129. The method of embodiment 128 wherein the treating results in at least a 60% mean reduction from baseline of MYOC mRNA in the trabecular meshwork tissue, ciliary body, retina, RPE, a retinal blood vessel (e.g., including endothelial cells and vascular smooth muscle cells), or choroid tissue, e.g., a choroid vessel.

[0744] 130. The method of embodiment 129, wherein the treating results in at least a 90% mean reduction from baseline of MYOC mRNA in the trabecular meshwork tissue, ciliary body, retina, RPE, a retinal blood vessel (e.g., including endothelial cells and vascular smooth muscle cells), or choroid tissue, e.g., a choroid vessel.

[0745] 131. The method of any one of embodiments 124-129, wherein after treatment the subject experiences at least an 8-week duration of knockdown following a single dose of dsRNA as assessed by MYOC protein in the retina.

[0746] 132. The method of embodiment 131, wherein treating results in at least a 12-week duration of knockdown following a single dose of dsRNA as assessed by MYOC protein in the retina.

[0747] 133. The method of embodiment 132, wherein treating results in at least a 16-week duration of knockdown following a single dose of dsRNA as assessed by MYOC protein in the retina.

[0748] 134. The method of any of embodiments 113-133, wherein the subject is human.

[0749] 135. The method of any one of embodiments 114-134, wherein the dsRNA agent is administered at a dose of about 0.01 mg/kg to about 50 mg/kg.

[0750] 136. The method of any one of embodiments 114-135, wherein the dsRNA agent is administered to the subject intraocularly, intravenously, or topically.

[0751] 137. The method of embodiment 136, wherein the intraocular administration comprises intravitreal administration (e.g., intravitreal injection), transscleral administration (e.g., transscleral injection), subconjunctival administration (e.g., subconjunctival injection), retrobulbar administration (e.g., retrobulbar injection), intracameral administration (e.g., intracameral injection), or subretinal administration (e.g., subretinal injection).

[0752] 138. The method of any one of embodiments 114-137, further comprising measuring level of MYOC (e.g., MYOC gene, MYOC mRNA, or MYOC protein) in the subject.

[0753] 139. The method of embodiment 138, where measuring the level of MYOC in the subject comprises measuring the level of MYOC gene, MYOC protein or MYOC mRNA in a biological sample from the subject (e.g., an aqueous ocular fluid sample).

[0754] 140. The method of any one of embodiments 114-139, further comprising performing a blood test, an imaging test, or an aqueous ocular fluid biopsy.

[0755] 141. The method of any one of embodiments 138-140, wherein measuring level of MYOC (e.g., MYOC gene, MYOC mRNA, or MYOC protein) in the subject is performed prior to treatment with the dsRNA agent or the pharmaceutical composition.

[0756] 142. The method of embodiment 141, wherein, upon determination that a subject has a level of MYOC (e.g., MYOC gene, MYOC mRNA, or MYOC protein) that is greater than a reference level, the dsRNA agent or the pharmaceutical composition is administered to the subject.

[0757] 143. The method of any one of embodiments 139-142, wherein measuring level of MYOC (e.g., MYOC gene, MYOC mRNA, or MYOC protein) in the subject is performed after treatment with the dsRNA agent or the pharmaceutical composition.

[0758] 144. The method of any one of embodiments 121-143, further comprising administering to the subject an additional agent and/or therapy suitable for treatment or prevention of an MYOC-associated disorder.

[0759] 145. The method of embodiment 144, wherein the additional agent and/or therapy comprises one or more of a photodynamic therapy, photocoagulation therapy, a steroid, a non-steroidal antiinflammatory agent, an anti-MYOC agent, and/or a vitrectomy.

### EXAMPLES

### Example 1. MYOC siRNA

[0760] Nucleic acid sequences provided herein are represented using standard nomenclature. See the abbreviations of Table 1.

[0761] Table 1. Abbreviations of nucleotide monomers used in nucleic acid sequence representation It will be understood that these monomers, when present in an oligonucleotide, are mutually linked by 5′-3′-phosphodiester bonds.

| | |
|---|---|
| Abbreviation | Nucleotide(s) |
| A | Adenosine-3′ -phosphate |
| Ab | beta-L-adenosine-3′-phosphate |
| Abs | beta-L-adenosine-3′-phosphorothioate |
| Af | 2′ -fluoroadenosine-3′ -phosphate |
| Afs | 2′-fluoroadenosine-3′-phosphorothioate |
| (Ahd) | 2′-O-hexadecyl-adenosine-3′ -phosphate |
| (Ahds) | 2′-O-hexadecyl-adenosine-3′-phosphorothioate |
| As | adenosine-3′ -phosphorothioate |
| C | cytidine-3′ -phosphate |
| Cb | beta-L-cytidine-3′ -phosphate |
| Cbs | beta-L-cytidine-3′-phosphorothioate |
| Cf | 2′-fluorocytidine-3 ‘-phosphate |
| Cfs | 2′-fluorocytidine-3′-phosphorothioate |
| (Chd) | 2′-O-hexadecyl-cytidine-3′-phosphate |
| (Chds) | 2′-O-hexadecyl-cytidine-3′-phosphorothioate |
| Cs | cytidine-3′ -phosphorothioate |
| G | guanosine-3′-phosphate |
| Gb | beta-L-guanosine-3′-phosphate |
| Gbs | beta-L-guanosine-3′-phosphorothioate |
| Gf | 2′-fluoroguanosine-3′ -phosphate |
| Gfs | 2′-fluoroguanosine-3′-phosphorothioate |
| (Ghd) | 2′-O-hexadecyl-guanosine-3′-phosphate |
| (Ghds) | 2′-O-hexadecyl-guanosine-3′-phosphorothioate |
| Gs | guanosine-3′-phosphorothioate |
| T | 5′ -methyluridine-3′ -phosphate |
| Tb | beta-L-thymidine-3 ' -phosphate |
| Tbs | beta-L-thymidine-3′-phosphorothioate |
| Tf | 2′ -fluoro-5-methyluridine-3′ -phosphate |
| Tfs | 2′-fluoro-5-methyluridine-3′-phosphorothioate |
| Tgn | thymidine-glycol nucleic acid (GNA) S-Isomer |
| Agn | adenosine- glycol nucleic acid (GNA) S-Isomer |
| Cgn | cytidine-glycol nucleic acid (GNA) S-Isomer |
| Ggn | guanosine-glycol nucleic acid (GNA) S-Isomer |
| Ts | 5-methyluridine-3′ -phosphorothioate |
| U | Uridine-3′-phosphate |
| Ub | beta-L-uridine-3′-phosphate |
| Ubs | beta-L-uridine-3′-phosphorothioate |
| Uf | 2′ -fluorouridine-3′ -phosphate |
| Ufs | 2′-fluorouridine -3′-phosphorothioate |
| (Uhd) | 2′-O-hexadecyl-uridine-3′-phosphate |
| (Uhds) | 2′-O-hexadecyl-uridine-3′-phosphorothioate |
| Us | uridine -3′-phosphorothioate |
| N | any nucleotide (G, A, C, T or U) |
| VP | Vinyl phosphonate |
| a | 2′-O-methyladenosine-3′-phosphate |
| as | 2′-O-methyladenosine-3′-phosphorothioate |
| c | 2′ -O-methylcytidine-3′ -phosphate |
| cs | 2′-O-methylcytidine-3′-phosphorothioate |
| g | 2′-O-methylguanosine-3′-phosphate |
| gs | 2′-O-methylguanosine-3′- phosphorothioate |
| t | 2′ -O-methyl-5-methyluridine-3′-phosphate |
| ts | 2′ -O-methyl-5-methyluridine-3′ -phosphorothioate |
| u | 2′-O-methyluridine-3 ‘-phosphate |
| us | 2′-O-methyluridine-3′-phosphorothioate |
| dA | 2′-deoxyadenosine-3′-phosphate |
| dAs | 2′-deoxyadenosine-3′-phosphorothioate |
| dC | 2′-deoxycytidine-3 ‘-phosphate |
| dCs | 2′-deoxycytidine-3′-phosphorothioate |
| dG | 2′-deoxyguanosine-3′ -phosphate |
| dGs | 2′-deoxyguanosine-3′-phosphorothioate |
| dT | 2′-deoxythymidine |
| dTs | 2′-deoxythymidine-3′-phosphorothioate |
| dU | 2′-deoxyuridine |
| s | phosphorothioate linkage |
| L96¹ | N-[tris(GalNAc-alkyl)-amidodecanoyl)]-4-hydroxyprolinol Hyp-(GalNAc-alkyl)3 |
| (Aeo) | 2′-O-methoxyethyladenosine-3′ -phosphate |
| (Aeos) | 2′-O-methoxyethyladenosine-3′ -phosphorothioate |
| (Geo) | 2′-O-methoxyethylguanosine-3′-phosphate |
| (Geos) | 2′-O-methoxyethylguanosine-3′-phosphorothioate |
| (Teo) | 2′-O-methoxyethyl-5-methyluridine-3′ -phosphate |
| (Teos) | 2′-O-methoxyethyl-5-methyluridine-3′-phosphorothioate |
| (m5Ceo) | 2′-O-methoxyethyl-5-methylcytidine-3′-phosphate |
| (m5Ceos) | 2′-O-methoxyethyl-5-methylcytidine-3′-phosphorothioate |

[0762] ¹The chemical structure of L96 is as follows:

[chemical structure]

### Experimental Methods

### Bioinformatics

### Transcripts

[0763] Four sets of siRNAs targeting the human MYOC, “myocilin” (human: NCBI refseqID NM_000261.2; NCBI GeneID: 4653) were generated. The human NM_000261.2 REFSEQ mRNA has a length of 2100 bases. Pairs of oligos were generated using bioinformatic methods and ranked, and exemplary pairs of oligos are shown in Table 2A, Table 2B, Table 3A, Table 3B, Table 4A,Table 4B, Table 5A and Table 5B. Modified sequences are presented in Table 2A, Table 3A, Table 4A and Table 5A. Unmodified sequences are presented in Table 2B, Table 3B, Table 4B and Table 5B.

TABLE 2A

Exemplary Human MYOC siRNA Modified Single Strands and Duplex Sequences

| Duplex Name | Sense Sequence Name | SEQ ID NO: (Sense) | Sense Sequence (5′-3′) | Antisense Oligo Name | SEQ ID NO: (Antisense) | Antisense Sequence | mRNA Target Sequence | SEQ ID NO: |
|---|---|---|---|---|---|---|---|---|
| AD-886932 | A-1683138.1 | 2749 | CAGUCCCAAUGAAUCCAGCdTdT | A-1683139.1 | 301 | GCUGGAUUCAUUGGGACUGdTdT | CAGUCCCAAUGAAUCCAGC | 2751 |
| AD-886933 | A-1683140.1 | 2750 | AGUCCCAAUGAAUCCAGCUdTdT | A-1683141.1 | 302 | AGCUGGAUUCAUUGGGACUdTdT | AGUCCCAAUGAAUCCAGCU | 2752 |
| AD-886934 | A-1683142.1 | 3 | GUCCCAAUGAAUCCAGCUGdTdT | A-1683143.1 | 303 | CAGCUGGAUUCAUUGGGACdTdT | GUCCCAAUGAAUCCAGCUG | 2753 |
| AD-886935 | A-1683144.1 | 4 | CCAUGUCAGUCAUCCAUAAdTdT | A-1683145.1 | 304 | UUAUGGAUGACUGACAUGGdTdT | CCAUGUCAGUCAUCCAUAA | 2754 |
| AD-886936 | A-1683146.1 | 5 | AUGUCAGUCAUCCAUAACUdTdT | A-1683147.1 | 305 | AGUUAUGGAUGACUGACAUdTdT | AUGUCAGUCAUCCAUAACU | 2755 |
| AD-886937 | A-1683148.1 | 6 | GCUGGAAACCCAAACCAGAdTdT | A-1683149.1 | 306 | UCUGGUUUGGGUUUCCAGCdTdT | GCUGGAAACCCAAACCAGA | 2756 |
| AD-886938 | A-1683150.1 | 7 | AAACCCAAACCAGAGAGUUdTdT | A-1683151.1 | 307 | AACUCUCUGGUUUGGGUUUdTdT | AAACCCAAACCAGAGAGUU | 2757 |
| AD-886939 | A-1683152.1 | 8 | AACCCAAACCAGAGAGUUGdTdT | A-1683153.1 | 308 | CAACUCUCUGGUUUGGGUUdTdT | AACCCAAACCAGAGAGUUG | 2758 |
| AD-886940 | A-1683154.1 | 9 | CCGAGACAAGUCAGUUCUGdTdT | A-1683155.1 | 309 | CAGAACUGACUUGUCUCGGdTdT | CCGAGACAAGUCAGUUCUG | 2759 |
| AD-886941 | A-1683156.1 | 10 | GAGACAAGUCAGUUCUGGAdTdT | A-1683157.1 | 310 | UCCAGAACUGACUUGUCUCdTdT | GAGACAAGUCAGUUCUGGA | 2760 |
| AD-886942 | A-1683158.1 | 11 | AGACAAGUCAGUUCUGGAGdTdT | A-1683159.1 | 311 | CUCCAGAACUGACUUGUCUdTdT | AGACAAGUCAGUUCUGGAG | 2761 |
| AD-886943 | A-1683160.1 | 12 | CAGUUCUGGAGGAAGAGAAdTdT | A-1683161.1 | 312 | UUCUCUUCCUCCAGAACUGdTdT | CAGUUCUGGAGGAAGAGAA | 2762 |
| AD-886944 | A-1683162.1 | 13 | AGUUCUGGAGGAAGAGAAGdTdT | A-1683163.1 | 313 | CUUCUCUUCCUCCAGAACUdTdT | AGUUCUGGAGGAAGAGAAG | 2763 |
| AD-886945 | A-1683164.1 | 14 | UCUGGAGGAAGAGAAGAAGdTdT | A-1683165.1 | 314 | CUUCUUCUCUUCCUCCAGAdTdT | UCUGGAGGAAGAGAAGAAG | 2764 |
| AD-886946 | A-1683166.1 | 15 | AGGCUCCAGAGAAGUUUCUdTdT | A-1683167.1 | 315 | AGAAACUUCUCUGGAGCCUdTdT | AGGCUCCAGAGAAGUUUCU | 2765 |
| AD-886947 | A-1683168.1 | 16 | GGCUCCAGAGAAGUUUCUAdTdT | A-1683169.1 | 316 | UAGAAACUUCUCUGGAGCCdTdT | GGCUCCAGAGAAGUUUCUA | 2766 |
| AD-886948 | A-1683170.1 | 17 | GCUCCAGAGAAGUUUCUACdTdT | A-1683171.1 | 317 | GUAGAAACUUCUCUGGAGCdTdT | GCUCCAGAGAAGUUUCUAC | 2767 |
| AD-886949 | A-1683172.1 | 18 | CUCCAGAGAAGUUUCUACGdTdT | A-1683173.1 | 318 | CGUAGAAACUUCUCUGGAGdTdT | CUCCAGAGAAGUUUCUACG | 2768 |
| AD-886950 | A-1683174.1 | 19 | UGAAGUCCGAGCUAACUGAdTdT | A-1683175.1 | 319 | UCAGUUAGCUCGGACUUCAdTdT | UGAAGUCCGAGCUAACUGA | 2769 |
| AD-886951 | A-1683176.1 | 20 | GUCCGAGCUAACUGAAGUUdTdT | A-1683177.1 | 320 | AACUUCAGUUAGCUCGGACdTdT | GUCCGAGCUAACUGAAGUU | 2770 |
| AD-886952 | A-1683178.1 | 21 | UCCGAGCUAACUGAAGUUCdTdT | A-1683179.1 | 321 | GAACUUCAGUUAGCUCGGAdTdT | UCCGAGCUAACUGAAGUUC | 2771 |
| AD-886953 | A-1683180.1 | 22 | CCGAGCUAACUGAAGUUCCdTdT | A-1683181.1 | 322 | GGAACUUCAGUUAGCUCGGdTdT | CCGAGCUAACUGAAGUUCC | 2772 |
| AD-886954 | A-1683182.1 | 23 | CGAGCUAACUGAAGUUCCUdTdT | A-1683183.1 | 323 | AGGAACUUCAGUUAGCUCGdTdT | CGAGCUAACUGAAGUUCCU | 2773 |
| AD-886955 | A-1683184.1 | 24 | GAGCUAACUGAAGUUCCUGdTdT | A-1683185.1 | 324 | CAGGAACUUCAGUUAGCUCdTdT | GAGCUAACUGAAGUUCCUG | 2774 |
| AD-886956 | A-1683186.1 | 25 | AGCUAACUGAAGUUCCUGCdTdT | A-1683187.1 | 325 | GCAGGAACUUCAGUUAGCUdTdT | AGCUAACUGAAGUUCCUGC | 2775 |
| AD-886957 | A-1683188.1 | 26 | GCUAACUGAAGUUCCUGCUdTdT | A-1683189.1 | 326 | AGCAGGAACUUCAGUUAGCdTdT | GCUAACUGAAGUUCCUGCU | 2776 |
| AD-886958 | A-1683190.1 | 27 | GUUCCUGCUUCCCGAAUUUdTdT | A-1683191.1 | 327 | AAAUUCGGGAAGCAGGAACdTdT | GUUCCUGCUUCCCGAAUUU | 2777 |
| AD-886959 | A-1683192.1 | 28 | UUCCUGCUUCCCGAAUUUUdTdT | A-1683193.1 | 328 | AAAAUUCGGGAAGCAGGAAdTdT | UUCCUGCUUCCCGAAUUUU | 2778 |
| AD-886960 | A-1683194.1 | 29 | UCCUGCUUCCCGAAUUUUGdTdT | A-1683195.1 | 329 | CAAAAUUCGGGAAGCAGGAdTdT | UCCUGCUUCCCGAAUUUUG | 2779 |
| AD-886961 | A-1683196.1 | 30 | CCUGCUUCCCGAAUUUUGAdTdT | A-1683197.1 | 330 | UCAAAAUUCGGGAAGCAGGdTdT | CCUGCUUCCCGAAUUUUGA | 2780 |
| AD-886962 | A-1683198.1 | 31 | CUGCUUCCCGAAUUUUGAAdTdT | A-1683199.1 | 331 | UUCAAAAUUCGGGAAGCAGdTdT | CUGCUUCCCGAAUUUUGAA | 2781 |
| AD-886963 | A-1683200.1 | 32 | UGCUUCCCGAAUUUUGAAGdTdT | A-1683201.1 | 332 | CUUCAAAAUUCGGGAAGCAdTdT | UGCUUCCCGAAUUUUGAAG | 2782 |
| AD-886964 | A-1683202.1 | 33 | GCUUCCCGAAUUUUGAAGGdTdT | A-1683203.1 | 333 | CCUUCAAAAUUCGGGAAGCdTdT | GCUUCCCGAAUUUUGAAGG | 2783 |
| AD-886965 | A-1683204.1 | 34 | CUUCCCGAAUUUUGAAGGAdTdT | A-1683205.1 | 334 | UCCUUCAAAAUUCGGGAAGdTdT | CUUCCCGAAUUUUGAAGGA | 2784 |
| AD-886966 | A-1683206.1 | 35 | UUCCCGAAUUUUGAAGGAGdTdT | A-1683207.1 | 335 | CUCCUUCAAAAUUCGGGAAdTdT | UUCCCGAAUUUUGAAGGAG | 2785 |
| AD-886967 | A-1683208.1 | 36 | UCCCGAAUUUUGAAGGAGAdTdT | A-1683209.1 | 336 | UCUCCUUCAAAAUUCGGGAdTdT | UCCCGAAUUUUGAAGGAGA | 2786 |
| AD-886968 | A-1683210.1 | 37 | CCCGAAUUUUGAAGGAGAGdTdT | A-1683211.1 | 337 | CUCUCCUUCAAAAUUCGGGdTdT | CCCGAAUUUUGAAGGAGAG | 2787 |
| AD-886969 | A-1683212.1 | 38 | CGGAUGUGGAGAACUAGUUdTdT | A-1683213.1 | 338 | AACUAGUUCUCCACAUCCGdTdT | CGGAUGUGGAGAACUAGUU | 2788 |
| AD-886970 | A-1683214.1 | 39 | GGAUGUGGAGAACUAGUUUdTdT | A-1683215.1 | 339 | AAACUAGUUCUCCACAUCCdTdT | GGAUGUGGAGAACUAGUUU | 2789 |
| AD-886971 | A-1683216.1 | 40 | GAUGUGGAGAACUAGUUUGdTdT | A-1683217.1 | 340 | CAAACUAGUUCUCCACAUCdTdT | GAUGUGGAGAACUAGUUUG | 2790 |
| AD-886972 | A-1683218.1 | 41 | AUGUGGAGAACUAGUUUGGdTdT | A-1683219.1 | 341 | CCAAACUAGUUCUCCACAUdTdT | AUGUGGAGAACUAGUUUGG | 2791 |
| AD-886973 | A-1683220.1 | 42 | UGUGGAGAACUAGUUUGGGdTdT | A-1683221.1 | 342 | CCCAAACUAGUUCUCCACAdTdT | UGUGGAGAACUAGUUUGGG | 2792 |
| AD-886974 | A-1683222.1 | 43 | GUGGAGAACUAGUUUGGGUdTdT | A-1683223.1 | 343 | ACCCAAACUAGUUCUCCACdTdT | GUGGAGAACUAGUUUGGGU | 2793 |
| AD-886975 | A-1683224.1 | 44 | UGGAGAACUAGUUUGGGUAdTdT | A-1683225.1 | 344 | UACCCAAACUAGUUCUCCAdTdT | UGGAGAACUAGUUUGGGUA | 2794 |
| AD-886976 | A-1683226.1 | 45 | GGAGAACUAGUUUGGGUAGdTdT | A-1683227.1 | 345 | CUACCCAAACUAGUUCUCCdTdT | GGAGAACUAGUUUGGGUAG | 2795 |
| AD-886977 | A-1683228.1 | 46 | GAGAACUAGUUUGGGUAGGdTdT | A-1683229.1 | 346 | CCUACCCAAACUAGUUCUCdTdT | GAGAACUAGUUUGGGUAGG | 2796 |
| AD-886978 | A-1683230.1 | 47 | ACGCUGAGAACAGCAGAAAdTdT | A-1683231.1 | 347 | UUUCUGCUGUUCUCAGCGUdTdT | ACGCUGAGAACAGCAGAAA | 2797 |
| AD-886979 | A-1683232.1 | 48 | GCUGAGAACAGCAGAAACAdTdT | A-1683233.1 | 348 | UGUUUCUGCUGUUCUCAGCdTdT | GCUGAGAACAGCAGAAACA | 2798 |
| AD-886980 | A-1683234.1 | 49 | CUGAGAACAGCAGAAACAAdTdT | A-1683235.1 | 349 | UUGUUUCUGCUGUUCUCAGdTdT | CUGAGAACAGCAGAAACAA | 2799 |
| AD-886981 | A-1683236.1 | 50 | UGAGAACAGCAGAAACAAUdTdT | A-1683237.1 | 350 | AUUGUUUCUGCUGUUCUCAdTdT | UGAGAACAGCAGAAACAAU | 2800 |
| AD-886982 | A-1683238.1 | 51 | GAGAACAGCAGAAACAAUUdTdT | A-1683239.1 | 351 | AAUUGUUUCUGCUGUUCUCdTdT | GAGAACAGCAGAAACAAUU | 2801 |
| AD-886983 | A-1683240.1 | 52 | AGAACAGCAGAAACAAUUAdTdT | A-1683241.1 | 352 | UAAUUGUUUCUGCUGUUCUdTdT | AGAACAGCAGAAACAAUUA | 2802 |
| AD-886984 | A-1683242.1 | 53 | GAACAGCAGAAACAAUUACdTdT | A-1683243.1 | 353 | GUAAUUGUUUCUGCUGUUCdTdT | GAACAGCAGAAACAAUUAC | 2803 |
| AD-886985 | A-1683244.1 | 54 | AACAGCAGAAACAAUUACUdTdT | A-1683245.1 | 354 | AGUAAUUGUUUCUGCUGUUdTdT | AACAGCAGAAACAAUUACU | 2804 |
| AD-886986 | A-1683246.1 | 55 | ACAGCAGAAACAAUUACUGdTdT | A-1683247.1 | 355 | CAGUAAUUGUUUCUGCUGUdTdT | ACAGCAGAAACAAUUACUG | 2805 |
| AD-886987 | A-1683248.1 | 56 | CAGCAGAAACAAUUACUGGdTdT | A-1683249.1 | 356 | CCAGUAAUUGUUUCUGCUGdTdT | CAGCAGAAACAAUUACUGG | 2806 |
| AD-886988 | A-1683250.1 | 57 | AGCAGAAACAAUUACUGGCdTdT | A-1683251.1 | 357 | GCCAGUAAUUGUUUCUGCUdTdT | AGCAGAAACAAUUACUGGC | 2807 |
| AD-886989 | A-1683252.1 | 58 | GCAGAAACAAUUACUGGCAdTdT | A-1683253.1 | 358 | UGCCAGUAAUUGUUUCUGCdTdT | GCAGAAACAAUUACUGGCA | 2808 |
| AD-886990 | A-1683254.1 | 59 | CAGAAACAAUUACUGGCAAdTdT | A-1683255.1 | 359 | UUGCCAGUAAUUGUUUCUGdTdT | CAGAAACAAUUACUGGCAA | 2809 |
| AD-886991 | A-1683256.1 | 60 | AGAAACAAUUACUGGCAAGdTdT | A-1683257.1 | 360 | CUUGCCAGUAAUUGUUUCUdTdT | AGAAACAAUUACUGGCAAG | 2810 |
| AD-886992 | A-1683258.1 | 61 | GAAACAAUUACUGGCAAGUdTdT | A-1683259.1 | 361 | ACUUGCCAGUAAUUGUUUCdTdT | GAAACAAUUACUGGCAAGU | 2811 |
| AD-886993 | A-1683260.1 | 62 | AACAAUUACUGGCAAGUAUdTdT | A-1683261.1 | 362 | AUACUUGCCAGUAAUUGUUdTdT | AACAAUUACUGGCAAGUAU | 2812 |
| AD-886994 | A-1683262.1 | 63 | ACAAUUACUGGCAAGUAUGdTdT | A-1683263.1 | 363 | CAUACUUGCCAGUAAUUGUdTdT | ACAAUUACUGGCAAGUAUG | 2813 |
| AD-886995 | A-1683264.1 | 64 | CAAUUACUGGCAAGUAUGGdTdT | A-1683265.1 | 364 | CCAUACUUGCCAGUAAUUGdTdT | CAAUUACUGGCAAGUAUGG | 2814 |
| AD-886996 | A-1683266.1 | 65 | AAUUACUGGCAAGUAUGGUdTdT | A-1683267.1 | 365 | ACCAUACUUGCCAGUAAUUdTdT | AAUUACUGGCAAGUAUGGU | 2815 |
| AD-886997 | A-1683268.1 | 66 | UACUGGCAAGUAUGGUGUGdTdT | A-1683269.1 | 366 | CACACCAUACUUGCCAGUAdTdT | UACUGGCAAGUAUGGUGUG | 2816 |
| AD-886998 | A-1683270.1 | 67 | AUGUCCGCCAGGUUUUUGAdTdT | A-1683271.1 | 367 | UCAAAAACCUGGCGGACAUdTdT | AUGUCCGCCAGGUUUUUGA | 2817 |
| AD-886999 | A-1683272.1 | 68 | UGUCCGCCAGGUUUUUGAGdTdT | A-1683273.1 | 368 | CUCAAAAACCUGGCGGACAdTdT | UGUCCGCCAGGUUUUUGAG | 2818 |
| AD-887000 | A-1683274.1 | 69 | GUCCGCCAGGUUUUUGAGUdTdT | A-1683275.1 | 369 | ACUCAAAAACCUGGCGGACdTdT | GUCCGCCAGGUUUUUGAGU | 2819 |
| AD-887001 | A-1683276.1 | 70 | UCCGCCAGGUUUUUGAGUAdTdT | A-1683277.1 | 370 | UACUCAAAAACCUGGCGGAdTdT | UCCGCCAGGUUUUUGAGUA | 2820 |
| AD-887002 | A-1683278.1 | 71 | CCGCCAGGUUUUUGAGUAUdTdT | A-1683279.1 | 371 | AUACUCAAAAACCUGGCGGdTdT | CCGCCAGGUUUUUGAGUAU | 2821 |
| AD-887003 | A-1683280.1 | 72 | CGCCAGGUUUUUGAGUAUGdTdT | A-1683281.1 | 372 | CAUACUCAAAAACCUGGCGdTdT | CGCCAGGUUUUUGAGUAUG | 2822 |
| AD-887004 | A-1683282.1 | 73 | GCCAGGUUUUUGAGUAUGAdTdT | A-1683283.1 | 373 | UCAUACUCAAAAACCUGGCdTdT | GCCAGGUUUUUGAGUAUGA | 2823 |
| AD-887005 | A-1683284.1 | 74 | CCAGGUUUUUGAGUAUGACdTdT | A-1683285.1 | 374 | GUCAUACUCAAAAACCUGGdTdT | CCAGGUUUUUGAGUAUGAC | 2824 |
| AD-887006 | A-1683286.1 | 75 | CAGGUUUUUGAGUAUGACCdTdT | A-1683287.1 | 375 | GGUCAUACUCAAAAACCUGdTdT | CAGGUUUUUGAGUAUGACC | 2825 |
| AD-887007 | A-1683288.1 | 76 | AGGUUUUUGAGUAUGACCUdTdT | A-1683289.1 | 376 | AGGUCAUACUCAAAAACCUdTdT | AGGUUUUUGAGUAUGACCU | 2826 |
| AD-887008 | A-1683290.1 | 77 | GGUUUUUGAGUAUGACCUCdTdT | A-1683291.1 | 377 | GAGGUCAUACUCAAAAACCdTdT | GGUUUUUGAGUAUGACCUC | 2827 |
| AD-887009 | A-1683292.1 | 78 | GUUUUUGAGUAUGACCUCAdTdT | A-1683293.1 | 378 | UGAGGUCAUACUCAAAAACdTdT | GUUUUUGAGUAUGACCUCA | 2828 |
| AD-887010 | A-1683294.1 | 79 | GACCUCAUCAGCCAGUUUAdTdT | A-1683295.1 | 379 | UAAACUGGCUGAUGAGGUCdTdT | GACCUCAUCAGCCAGUUUA | 2829 |
| AD-887011 | A-1683296.1 | 80 | ACCUCAUCAGCCAGUUUAUdTdT | A-1683297.1 | 380 | AUAAACUGGCUGAUGAGGUdTdT | ACCUCAUCAGCCAGUUUAU | 2830 |
| AD-887012 | A-1683298.1 | 81 | CCUCAUCAGCCAGUUUAUGdTdT | A-1683299.1 | 381 | CAUAAACUGGCUGAUGAGGdTdT | CCUCAUCAGCCAGUUUAUG | 2831 |
| AD-887013 | A-1683300.1 | 82 | CUCAUCAGCCAGUUUAUGCdTdT | A-1683301.1 | 382 | GCAUAAACUGGCUGAUGAGdTdT | CUCAUCAGCCAGUUUAUGC | 2832 |
| AD-887014 | A-1683302.1 | 83 | UCAUCAGCCAGUUUAUGCAdTdT | A-1683303.1 | 383 | UGCAUAAACUGGCUGAUGAdTdT | UCAUCAGCCAGUUUAUGCA | 2833 |
| AD-887015 | A-1683304.1 | 84 | UCAGCCAGUUUAUGCAGGGdTdT | A-1683305.1 | 384 | CCCUGCAUAAACUGGCUGAdTdT | UCAGCCAGUUUAUGCAGGG | 2834 |
| AD-887016 | A-1683306.1 | 85 | GGCUACCCUUCUAAGGUUCdTdT | A-1683307.1 | 385 | GAACCUUAGAAGGGUAGCCdTdT | GGCUACCCUUCUAAGGUUC | 2835 |
| AD-887017 | A-1683308.1 | 86 | GCUACCCUUCUAAGGUUCAdTdT | A-1683309.1 | 386 | UGAACCUUAGAAGGGUAGCdTdT | GCUACCCUUCUAAGGUUCA | 2836 |
| AD-887018 | A-1683310.1 | 87 | CUACCCUUCUAAGGUUCACdTdT | A-1683311.1 | 387 | GUGAACCUUAGAAGGGUAGdTdT | CUACCCUUCUAAGGUUCAC | 2837 |
| AD-887019 | A-1683312.1 | 88 | UACCCUUCUAAGGUUCACAdTdT | A-1683313.1 | 388 | UGUGAACCUUAGAAGGGUAdTdT | UACCCUUCUAAGGUUCACA | 2838 |
| AD-887020 | A-1683314.1 | 89 | ACCCUUCUAAGGUUCACAUdTdT | A-1683315.1 | 389 | AUGUGAACCUUAGAAGGGUdTdT | ACCCUUCUAAGGUUCACAU | 2839 |
| AD-887021 | A-1683316.1 | 90 | CCCUUCUAAGGUUCACAUAdTdT | A-1683317.1 | 390 | UAUGUGAACCUUAGAAGGGdTdT | CCCUUCUAAGGUUCACAUA | 2840 |
| AD-887022 | A-1683318.1 | 91 | CCUUCUAAGGUUCACAUACdTdT | A-1683319.1 | 391 | GUAUGUGAACCUUAGAAGGdTdT | CCUUCUAAGGUUCACAUAC | 2841 |
| AD-887023 | A-1683320.1 | 92 | CUUCUAAGGUUCACAUACUdTdT | A-1683321.1 | 392 | AGUAUGUGAACCUUAGAAGdTdT | CUUCUAAGGUUCACAUACU | 2842 |
| AD-887024 | A-1683322.1 | 93 | UUCUAAGGUUCACAUACUGdTdT | A-1683323.1 | 393 | CAGUAUGUGAACCUUAGAAdTdT | UUCUAAGGUUCACAUACUG | 2843 |
| AD-887025 | A-1683324.1 | 94 | CUAAGGUUCACAUACUGCCdTdT | A-1683325.1 | 394 | GGCAGUAUGUGAACCUUAGdTdT | CUAAGGUUCACAUACUGCC | 2844 |
| AD-887026 | A-1683326.1 | 95 | UAAGGUUCACAUACUGCCUdTdT | A-1683327.1 | 395 | AGGCAGUAUGUGAACCUUAdTdT | UAAGGUUCACAUACUGCCU | 2845 |
| AD-887027 | A-1683328.1 | 96 | GAGUCCAGAACUGUCAUAAdTdT | A-1683329.1 | 396 | UUAUGACAGUUCUGGACUCdTdT | GAGUCCAGAACUGUCAUAA | 2846 |
| AD-887028 | A-1683330.1 | 97 | AGUCCAGAACUGUCAUAAGdTdT | A-1683331.1 | 397 | CUUAUGACAGUUCUGGACUdTdT | AGUCCAGAACUGUCAUAAG | 2847 |
| AD-887029 | A-1683332.1 | 98 | GUCCAGAACUGUCAUAAGAdTdT | A-1683333.1 | 398 | UCUUAUGACAGUUCUGGACdTdT | GUCCAGAACUGUCAUAAGA | 2848 |
| AD-887030 | A-1683334.1 | 99 | UCCAGAACUGUCAUAAGAUdTdT | A-1683335.1 | 399 | AUCUUAUGACAGUUCUGGAdTdT | UCCAGAACUGUCAUAAGAU | 2849 |
| AD-887031 | A-1683336.1 | 100 | CCAGAACUGUCAUAAGAUAdTdT | A-1683337.1 | 400 | UAUCUUAUGACAGUUCUGGdTdT | CCAGAACUGUCAUAAGAUA | 2850 |
| AD-887032 | A-1683338.1 | 101 | CAGAACUGUCAUAAGAUAUdTdT | A-1683339.1 | 401 | AUAUCUUAUGACAGUUCUGdTdT | CAGAACUGUCAUAAGAUAU | 2851 |
| AD-887033 | A-1683340.1 | 102 | AGAACUGUCAUAAGAUAUGdTdT | A-1683341.1 | 402 | CAUAUCUUAUGACAGUUCUdTdT | AGAACUGUCAUAAGAUAUG | 2852 |
| AD-887034 | A-1683342.1 | 103 | GAACUGUCAUAAGAUAUGAdTdT | A-1683343.1 | 403 | UCAUAUCUUAUGACAGUUCdTdT | GAACUGUCAUAAGAUAUGA | 2853 |
| AD-887035 | A-1683344.1 | 104 | AACUGUCAUAAGAUAUGAGdTdT | A-1683345.1 | 404 | CUCAUAUCUUAUGACAGUUdTdT | AACUGUCAUAAGAUAUGAG | 2854 |
| AD-887036 | A-1683346.1 | 105 | ACUGUCAUAAGAUAUGAGCdTdT | A-1683347.1 | 405 | GCUCAUAUCUUAUGACAGUdTdT | ACUGUCAUAAGAUAUGAGC | 2855 |
| AD-887037 | A-1683348.1 | 106 | CUGUCAUAAGAUAUGAGCUdTdT | A-1683349.1 | 406 | AGCUCAUAUCUUAUGACAGdTdT | CUGUCAUAAGAUAUGAGCU | 2856 |
| AD-887038 | A-1683350.1 | 107 | UGUCAUAAGAUAUGAGCUGdTdT | A-1683351.1 | 407 | CAGCUCAUAUCUUAUGACAdTdT | UGUCAUAAGAUAUGAGCUG | 2857 |
| AD-887039 | A-1683352.1 | 108 | GUCAUAAGAUAUGAGCUGAdTdT | A-1683353.1 | 408 | UCAGCUCAUAUCUUAUGACdTdT | GUCAUAAGAUAUGAGCUGA | 2858 |
| AD-887040 | A-1683354.1 | 109 | AAGAUAUGAGCUGAAUACCdTdT | A-1683355.1 | 409 | GGUAUUCAGCUCAUAUCUUdTdT | AAGAUAUGAGCUGAAUACC | 2859 |
| AD-887041 | A-1683356.1 | 110 | UGAAUACCGAGACAGUGAAdTdT | A-1683357.1 | 410 | UUCACUGUCUCGGUAUUCAdTdT | UGAAUACCGAGACAGUGAA | 2860 |
| AD-887042 | A-1683358.1 | 111 | UGAAGGCUGAGAAGGAAAUdTdT | A-1683359.1 | 411 | AUUUCCUUCUCAGCCUUCAdTdT | UGAAGGCUGAGAAGGAAAU | 2861 |
| AD-887043 | A-1683360.1 | 112 | GGCUGAGAAGGAAAUCCCUdTdT | A-1683361.1 | 412 | AGGGAUUUCCUUCUCAGCCdTdT | GGCUGAGAAGGAAAUCCCU | 2862 |
| AD-887044 | A-1683362.1 | 113 | CGGACAGUUCCCGUAUUCUdTdT | A-1683363.1 | 413 | AGAAUACGGGAACUGUCCGdTdT | CGGACAGUUCCCGUAUUCU | 2863 |
| AD-887045 | A-1683364.1 | 114 | GGACAGUUCCCGUAUUCUUdTdT | A-1683365.1 | 414 | AAGAAUACGGGAACUGUCCdTdT | GGACAGUUCCCGUAUUCUU | 2864 |
| AD-887046 | A-1683366.1 | 115 | GACAGUUCCCGUAUUCUUGdTdT | A-1683367.1 | 415 | CAAGAAUACGGGAACUGUCdTdT | GACAGUUCCCGUAUUCUUG | 2865 |
| AD-887047 | A-1683368.1 | 116 | ACAGUUCCCGUAUUCUUGGdTdT | A-1683369.1 | 416 | CCAAGAAUACGGGAACUGUdTdT | ACAGUUCCCGUAUUCUUGG | 2866 |
| AD-887048 | A-1683370.1 | 117 | GCCUCUGGGUCAUUUACAGdTdT | A-1683371.1 | 417 | CUGUAAAUGACCCAGAGGCdTdT | GCCUCUGGGUCAUUUACAG | 2867 |
| AD-887049 | A-1683372.1 | 118 | CCAUUGUCCUCUCCAAACUdTdT | A-1683373.1 | 418 | AGUUUGGAGAGGACAAUGGdTdT | CCAUUGUCCUCUCCAAACU | 2868 |
| AD-887050 | A-1683374.1 | 119 | CAUUGUCCUCUCCAAACUGdTdT | A-1683375.1 | 419 | CAGUUUGGAGAGGACAAUGdTdT | CAUUGUCCUCUCCAAACUG | 2869 |
| AD-887051 | A-1683376.1 | 120 | AUUGUCCUCUCCAAACUGAdTdT | A-1683377.1 | 420 | UCAGUUUGGAGAGGACAAUdTdT | AUUGUCCUCUCCAAACUGA | 2870 |
| AD-887052 | A-1683378.1 | 121 | UUGUCCUCUCCAAACUGAAdTdT | A-1683379.1 | 421 | UUCAGUUUGGAGAGGACAAdTdT | UUGUCCUCUCCAAACUGAA | 2871 |
| AD-887053 | A-1683380.1 | 122 | UCUCCAAACUGAACCCAGAdTdT | A-1683381.1 | 422 | UCUGGGUUCAGUUUGGAGAdTdT | UCUCCAAACUGAACCCAGA | 2872 |
| AD-887054 | A-1683382.1 | 123 | CAAACUGAACCCAGAGAAUdTdT | A-1683383.1 | 423 | AUUCUCUGGGUUCAGUUUGdTdT | CAAACUGAACCCAGAGAAU | 2873 |
| AD-887055 | A-1683384.1 | 124 | AAACUGAACCCAGAGAAUCdTdT | A-1683385.1 | 424 | GAUUCUCUGGGUUCAGUUUdTdT | AAACUGAACCCAGAGAAUC | 2874 |
| AD-887056 | A-1683386.1 | 125 | CCCAGAGAAUCUGGAACUCdTdT | A-1683387.1 | 425 | GAGUUCCAGAUUCUCUGGGdTdT | CCCAGAGAAUCUGGAACUC | 2875 |
| AD-887057 | A-1683388.1 | 126 | GUCGCCAAUGCCUUCAUCAdTdT | A-1683389.1 | 426 | UGAUGAAGGCAUUGGCGACdTdT | GUCGCCAAUGCCUUCAUCA | 2876 |
| AD-887058 | A-1683390.1 | 127 | CCAAUGCCUUCAUCAUCUGdTdT | A-1683391.1 | 427 | CAGAUGAUGAAGGCAUUGGdTdT | CCAAUGCCUUCAUCAUCUG | 2877 |
| AD-887059 | A-1683392.1 | 128 | AAUGCCUUCAUCAUCUGUGdTdT | A-1683393.1 | 428 | CACAGAUGAUGAAGGCAUUdTdT | AAUGCCUUCAUCAUCUGUG | 2878 |
| AD-887060 | A-1683394.1 | 129 | AUGCCUUCAUCAUCUGUGGdTdT | A-1683395.1 | 429 | CCACAGAUGAUGAAGGCAUdTdT | AUGCCUUCAUCAUCUGUGG | 2879 |
| AD-887061 | A-1683396.1 | 130 | GUGGCACCUUGUACACCGUdTdT | A-1683397.1 | 430 | ACGGUGUACAAGGUGCCACdTdT | GUGGCACCUUGUACACCGU | 2880 |
| AD-887062 | A-1683398.1 | 131 | ACCGUCAACUUUGCUUAUGdTdT | A-1683399.1 | 431 | CAUAAGCAAAGUUGACGGUdTdT | ACCGUCAACUUUGCUUAUG | 2881 |
| AD-887063 | A-1683400.1 | 132 | CCGUCAACUUUGCUUAUGAdTdT | A-1683401.1 | 432 | UCAUAAGCAAAGUUGACGGdTdT | CCGUCAACUUUGCUUAUGA | 2882 |
| AD-887064 | A-1683402.1 | 133 | CGUCAACUUUGCUUAUGACdTdT | A-1683403.1 | 433 | GUCAUAAGCAAAGUUGACGdTdT | CGUCAACUUUGCUUAUGAC | 2883 |
| AD-887065 | A-1683404.1 | 134 | GUCAACUUUGCUUAUGACAdTdT | A-1683405.1 | 434 | UGUCAUAAGCAAAGUUGACdTdT | GUCAACUUUGCUUAUGACA | 2884 |
| AD-887066 | A-1683406.1 | 135 | UCAACUUUGCUUAUGACACdTdT | A-1683407.1 | 435 | GUGUCAUAAGCAAAGUUGAdTdT | UCAACUUUGCUUAUGACAC | 2885 |
| AD-887067 | A-1683408.1 | 136 | CCCUGACCAUCCCAUUCAAdTdT | A-1683409.1 | 436 | UUGAAUGGGAUGGUCAGGGdTdT | CCCUGACCAUCCCAUUCAA | 2886 |
| AD-887068 | A-1683410.1 | 137 | CCUGACCAUCCCAUUCAAGdTdT | A-1683411.1 | 437 | CUUGAAUGGGAUGGUCAGGdTdT | CCUGACCAUCCCAUUCAAG | 2887 |
| AD-887069 | A-1683412.1 | 138 | CUGACCAUCCCAUUCAAGAdTdT | A-1683413.1 | 438 | UCUUGAAUGGGAUGGUCAGdTdT | CUGACCAUCCCAUUCAAGA | 2888 |
| AD-887070 | A-1683414.1 | 139 | CCAUCCCAUUCAAGAACCGdTdT | A-1683415.1 | 439 | CGGUUCUUGAAUGGGAUGGdTdT | CCAUCCCAUUCAAGAACCG | 2889 |
| AD-887071 | A-1683416.1 | 140 | AUCCCAUUCAAGAACCGCUdTdT | A-1683417.1 | 440 | AGCGGUUCUUGAAUGGGAUdTdT | AUCCCAUUCAAGAACCGCU | 2890 |
| AD-887072 | A-1683418.1 | 141 | UCCCAUUCAAGAACCGCUAdTdT | A-1683419.1 | 441 | UAGCGGUUCUUGAAUGGGAdTdT | UCCCAUUCAAGAACCGCUA | 2891 |
| AD-887073 | A-1683420.1 | 142 | CCCAUUCAAGAACCGCUAUdTdT | A-1683421.1 | 442 | AUAGCGGUUCUUGAAUGGGdTdT | CCCAUUCAAGAACCGCUAU | 2892 |
| AD-887074 | A-1683422.1 | 143 | AAGUACAGCAGCAUGAUUGdTdT | A-1683423.1 | 443 | CAAUCAUGCUGCUGUACUUdTdT | AAGUACAGCAGCAUGAUUG | 2893 |
| AD-887075 | A-1683424.1 | 144 | AGUACAGCAGCAUGAUUGAdTdT | A-1683425.1 | 444 | UCAAUCAUGCUGCUGUACUdTdT | AGUACAGCAGCAUGAUUGA | 2894 |
| AD-887076 | A-1683426.1 | 145 | ACAGCAGCAUGAUUGACUAdTdT | A-1683427.1 | 445 | UAGUCAAUCAUGCUGCUGUdTdT | ACAGCAGCAUGAUUGACUA | 2895 |
| AD-887077 | A-1683428.1 | 146 | CAGCAGCAUGAUUGACUACdTdT | A-1683429.1 | 446 | GUAGUCAAUCAUGCUGCUGdTdT | CAGCAGCAUGAUUGACUAC | 2896 |
| AD-887078 | A-1683430.1 | 147 | AGCAGCAUGAUUGACUACAdTdT | A-1683431.1 | 447 | UGUAGUCAAUCAUGCUGCUdTdT | AGCAGCAUGAUUGACUACA | 2897 |
| AD-887079 | A-1683432.1 | 148 | GCAGCAUGAUUGACUACAAdTdT | A-1683433.1 | 448 | UUGUAGUCAAUCAUGCUGCdTdT | GCAGCAUGAUUGACUACAA | 2898 |
| AD-887080 | A-1683434.1 | 149 | CAGCAUGAUUGACUACAACdTdT | A-1683435.1 | 449 | GUUGUAGUCAAUCAUGCUGdTdT | CAGCAUGAUUGACUACAAC | 2899 |
| AD-887081 | A-1683436.1 | 150 | AGCAUGAUUGACUACAACCdTdT | A-1683437.1 | 450 | GGUUGUAGUCAAUCAUGCUdTdT | AGCAUGAUUGACUACAACC | 2900 |
| AD-887082 | A-1683438.1 | 151 | GCAUGAUUGACUACAACCCdTdT | A-1683439.1 | 451 | GGGUUGUAGUCAAUCAUGCdTdT | GCAUGAUUGACUACAACCC | 2901 |
| AD-887083 | A-1683440.1 | 152 | UCUUUGCCUGGGACAACUUdTdT | A-1683441.1 | 452 | AAGUUGUCCCAGGCAAAGAdTdT | UCUUUGCCUGGGACAACUU | 2902 |
| AD-887084 | A-1683442.1 | 153 | UUGCCUGGGACAACUUGAAdTdT | A-1683443.1 | 453 | UUCAAGUUGUCCCAGGCAAdTdT | UUGCCUGGGACAACUUGAA | 2903 |
| AD-887085 | A-1683444.1 | 154 | CCUGGGACAACUUGAACAUdTdT | A-1683445.1 | 454 | AUGUUCAAGUUGUCCCAGGdTdT | CCUGGGACAACUUGAACAU | 2904 |
| AD-887086 | A-1683446.1 | 155 | CUGGGACAACUUGAACAUGdTdT | A-1683447.1 | 455 | CAUGUUCAAGUUGUCCCAGdTdT | CUGGGACAACUUGAACAUG | 2905 |
| AD-887087 | A-1683448.1 | 156 | UGGGACAACUUGAACAUGGdTdT | A-1683449.1 | 456 | CCAUGUUCAAGUUGUCCCAdTdT | UGGGACAACUUGAACAUGG | 2906 |
| AD-887088 | A-1683450.1 | 157 | GGGACAACUUGAACAUGGUdTdT | A-1683451.1 | 457 | ACCAUGUUCAAGUUGUCCCdTdT | GGGACAACUUGAACAUGGU | 2907 |
| AD-887089 | A-1683452.1 | 158 | GGACAACUUGAACAUGGUCdTdT | A-1683453.1 | 458 | GACCAUGUUCAAGUUGUCCdTdT | GGACAACUUGAACAUGGUC | 2908 |
| AD-887090 | A-1683454.1 | 159 | GACAACUUGAACAUGGUCAdTdT | A-1683455.1 | 459 | UGACCAUGUUCAAGUUGUCdTdT | GACAACUUGAACAUGGUCA | 2909 |
| AD-887091 | A-1683456.1 | 160 | ACAACUUGAACAUGGUCACdTdT | A-1683457.1 | 460 | GUGACCAUGUUCAAGUUGUdTdT | ACAACUUGAACAUGGUCAC | 2910 |
| AD-887092 | A-1683458.1 | 161 | CAACUUGAACAUGGUCACUdTdT | A-1683459.1 | 461 | AGUGACCAUGUUCAAGUUGdTdT | CAACUUGAACAUGGUCACU | 2911 |
| AD-887093 | A-1683460.1 | 162 | ACUUGAACAUGGUCACUUAdTdT | A-1683461.1 | 462 | UAAGUGACCAUGUUCAAGUdTdT | ACUUGAACAUGGUCACUUA | 2912 |
| AD-887094 | A-1683462.1 | 163 | CUUGAACAUGGUCACUUAUdTdT | A-1683463.1 | 463 | AUAAGUGACCAUGUUCAAGdTdT | CUUGAACAUGGUCACUUAU | 2913 |
| AD-887095 | A-1683464.1 | 164 | UUGAACAUGGUCACUUAUGdTdT | A-1683465.1 | 464 | CAUAAGUGACCAUGUUCAAdTdT | UUGAACAUGGUCACUUAUG | 2914 |
| AD-887096 | A-1683466.1 | 165 | UGAACAUGGUCACUUAUGAdTdT | A-1683467.1 | 465 | UCAUAAGUGACCAUGUUCAdTdT | UGAACAUGGUCACUUAUGA | 2915 |
| AD-887097 | A-1683468.1 | 166 | GAACAUGGUCACUUAUGACdTdT | A-1683469.1 | 466 | GUCAUAAGUGACCAUGUUCdTdT | GAACAUGGUCACUUAUGAC | 2916 |
| AD-887098 | A-1683470.1 | 167 | AACAUGGUCACUUAUGACAdTdT | A-1683471.1 | 467 | UGUCAUAAGUGACCAUGUUdTdT | AACAUGGUCACUUAUGACA | 2917 |
| AD-887099 | A-1683472.1 | 168 | ACAUGGUCACUUAUGACAUdTdT | A-1683473.1 | 468 | AUGUCAUAAGUGACCAUGUdTdT | ACAUGGUCACUUAUGACAU | 2918 |
| AD-887100 | A-1683474.1 | 169 | CAUGGUCACUUAUGACAUCdTdT | A-1683475.1 | 469 | GAUGUCAUAAGUGACCAUGdTdT | CAUGGUCACUUAUGACAUC | 2919 |
| AD-887101 | A-1683476.1 | 170 | UGGUCACUUAUGACAUCAAdTdT | A-1683477.1 | 470 | UUGAUGUCAUAAGUGACCAdTdT | UGGUCACUUAUGACAUCAA | 2920 |
| AD-887102 | A-1683478.1 | 171 | GGUCACUUAUGACAUCAAGdTdT | A-1683479.1 | 471 | CUUGAUGUCAUAAGUGACCdTdT | GGUCACUUAUGACAUCAAG | 2921 |
| AD-887103 | A-1683480.1 | 172 | GUCACUUAUGACAUCAAGCdTdT | A-1683481.1 | 472 | GCUUGAUGUCAUAAGUGACdTdT | GUCACUUAUGACAUCAAGC | 2922 |
| AD-887104 | A-1683482.1 | 173 | ACAUCAAGCUCUCCAAGAUdTdT | A-1683483.1 | 473 | AUCUUGGAGAGCUUGAUGUdTdT | ACAUCAAGCUCUCCAAGAU | 2923 |
| AD-887105 | A-1683484.1 | 174 | AUCAAGCUCUCCAAGAUGUdTdT | A-1683485.1 | 474 | ACAUCUUGGAGAGCUUGAUdTdT | AUCAAGCUCUCCAAGAUGU | 2924 |
| AD-887106 | A-1683486.1 | 175 | UCAAGCUCUCCAAGAUGUGdTdT | A-1683487.1 | 475 | CACAUCUUGGAGAGCUUGAdTdT | UCAAGCUCUCCAAGAUGUG | 2925 |
| AD-887107 | A-1683488.1 | 176 | AGCUCUCCAAGAUGUGAAAdTdT | A-1683489.1 | 476 | UUUCACAUCUUGGAGAGCUdTdT | AGCUCUCCAAGAUGUGAAA | 2926 |
| AD-887108 | A-1683490.1 | 177 | GCUCUCCAAGAUGUGAAAAdTdT | A-1683491.1 | 477 | UUUUCACAUCUUGGAGAGCdTdT | GCUCUCCAAGAUGUGAAAA | 2927 |
| AD-887109 | A-1683492.1 | 178 | CUCUCCAAGAUGUGAAAAGdTdT | A-1683493.1 | 478 | CUUUUCACAUCUUGGAGAGdTdT | CUCUCCAAGAUGUGAAAAG | 2928 |
| AD-887110 | A-1683494.1 | 179 | UCUCCAAGAUGUGAAAAGCdTdT | A-1683495.1 | 479 | GCUUUUCACAUCUUGGAGAdTdT | UCUCCAAGAUGUGAAAAGC | 2929 |
| AD-887111 | A-1683496.1 | 180 | UCCAAGAUGUGAAAAGCCUdTdT | A-1683497.1 | 480 | AGGCUUUUCACAUCUUGGAdTdT | UCCAAGAUGUGAAAAGCCU | 2930 |
| AD-887112 | A-1683498.1 | 181 | CCAAGAUGUGAAAAGCCUCdTdT | A-1683499.1 | 481 | GAGGCUUUUCACAUCUUGGdTdT | CCAAGAUGUGAAAAGCCUC | 2931 |
| AD-887113 | A-1683500.1 | 182 | GGAUGAACAUGGUCACCAUdTdT | A-1683501.1 | 482 | AUGGUGACCAUGUUCAUCCdTdT | GGAUGAACAUGGUCACCAU | 2932 |
| AD-887114 | A-1683502.1 | 183 | CAGGAAUUGUAGUCUGAGGdTdT | A-1683503.1 | 483 | CCUCAGACUACAAUUCCUGdTdT | CAGGAAUUGUAGUCUGAGG | 2933 |
| AD-887115 | A-1683504.1 | 184 | AGGAAUUGUAGUCUGAGGGdTdT | A-1683505.1 | 484 | CCCUCAGACUACAAUUCCUdTdT | AGGAAUUGUAGUCUGAGGG | 2934 |
| AD-887116 | A-1683506.1 | 185 | UCUUCUGUCAGCAUUUAUGdTdT | A-1683507.1 | 485 | CAUAAAUGCUGACAGAAGAdTdT | UCUUCUGUCAGCAUUUAUG | 2935 |
| AD-887117 | A-1683508.1 | 186 | CUUCUGUCAGCAUUUAUGGdTdT | A-1683509.1 | 486 | CCAUAAAUGCUGACAGAAGdTdT | CUUCUGUCAGCAUUUAUGG | 2936 |
| AD-887118 | A-1683510.1 | 187 | UUCUGUCAGCAUUUAUGGGdTdT | A-1683511.1 | 487 | CCCAUAAAUGCUGACAGAAdTdT | UUCUGUCAGCAUUUAUGGG | 2937 |
| AD-887119 | A-1683512.1 | 188 | CUGUCAGCAUUUAUGGGAUdTdT | A-1683513.1 | 488 | AUCCCAUAAAUGCUGACAGdTdT | CUGUCAGCAUUUAUGGGAU | 2938 |
| AD-887120 | A-1683514.1 | 189 | UGUCAGCAUUUAUGGGAUGdTdT | A-1683515.1 | 489 | CAUCCCAUAAAUGCUGACAdTdT | UGUCAGCAUUUAUGGGAUG | 2939 |
| AD-887121 | A-1683516.1 | 190 | GUCAGCAUUUAUGGGAUGUdTdT | A-1683517.1 | 490 | ACAUCCCAUAAAUGCUGACdTdT | GUCAGCAUUUAUGGGAUGU | 2940 |
| AD-887122 | A-1683518.1 | 191 | UCAGCAUUUAUGGGAUGUUdTdT | A-1683519.1 | 491 | AACAUCCCAUAAAUGCUGAdTdT | UCAGCAUUUAUGGGAUGUU | 2941 |
| AD-887123 | A-1683520.1 | 192 | CAGCAUUUAUGGGAUGUUUdTdT | A-1683521.1 | 492 | AAACAUCCCAUAAAUGCUGdTdT | CAGCAUUUAUGGGAUGUUU | 2942 |
| AD-887124 | A-1683522.1 | 193 | AGCAUUUAUGGGAUGUUUAdTdT | A-1683523.1 | 493 | UAAACAUCCCAUAAAUGCUdTdT | AGCAUUUAUGGGAUGUUUA | 2943 |
| AD-887125 | A-1683524.1 | 194 | GCAUUUAUGGGAUGUUUAAdTdT | A-1683525.1 | 494 | UUAAACAUCCCAUAAAUGCdTdT | GCAUUUAUGGGAUGUUUAA | 2944 |
| AD-887126 | A-1683526.1 | 195 | CAUUUAUGGGAUGUUUAAUdTdT | A-1683527.1 | 495 | AUUAAACAUCCCAUAAAUGdTdT | CAUUUAUGGGAUGUUUAAU | 2945 |
| AD-887127 | A-1683528.1 | 196 | AUUUAUGGGAUGUUUAAUGdTdT | A-1683529.1 | 496 | CAUUAAACAUCCCAUAAAUdTdT | AUUUAUGGGAUGUUUAAUG | 2946 |
| AD-887128 | A-1683530.1 | 197 | UUUAUGGGAUGUUUAAUGAdTdT | A-1683531.1 | 497 | UCAUUAAACAUCCCAUAAAdTdT | UUUAUGGGAUGUUUAAUGA | 2947 |
| AD-887129 | A-1683532.1 | 198 | UUAUGGGAUGUUUAAUGACdTdT | A-1683533.1 | 498 | GUCAUUAAACAUCCCAUAAdTdT | UUAUGGGAUGUUUAAUGAC | 2948 |
| AD-887130 | A-1683534.1 | 199 | AUGGGAUGUUUAAUGACAUdTdT | A-1683535.1 | 499 | AUGUCAUUAAACAUCCCAUdTdT | AUGGGAUGUUUAAUGACAU | 2949 |
| AD-887131 | A-1683536.1 | 200 | UGGGAUGUUUAAUGACAUAdTdT | A-1683537.1 | 500 | UAUGUCAUUAAACAUCCCAdTdT | UGGGAUGUUUAAUGACAUA | 2950 |
| AD-887132 | A-1683538.1 | 201 | GGGAUGUUUAAUGACAUAGdTdT | A-1683539.1 | 501 | CUAUGUCAUUAAACAUCCCdTdT | GGGAUGUUUAAUGACAUAG | 2951 |
| AD-887133 | A-1683540.1 | 202 | GGAUGUUUAAUGACAUAGUdTdT | A-1683541.1 | 502 | ACUAUGUCAUUAAACAUCCdTdT | GGAUGUUUAAUGACAUAGU | 2952 |
| AD-887134 | A-1683542.1 | 203 | GAUGUUUAAUGACAUAGUUdTdT | A-1683543.1 | 503 | AACUAUGUCAUUAAACAUCdTdT | GAUGUUUAAUGACAUAGUU | 2953 |
| AD-887135 | A-1683544.1 | 204 | AUGUUUAAUGACAUAGUUCdTdT | A-1683545.1 | 504 | GAACUAUGUCAUUAAACAUdTdT | AUGUUUAAUGACAUAGUUC | 2954 |
| AD-887136 | A-1683546.1 | 205 | UGUUUAAUGACAUAGUUCAdTdT | A-1683547.1 | 505 | UGAACUAUGUCAUUAAACAdTdT | UGUUUAAUGACAUAGUUCA | 2955 |
| AD-887137 | A-1683548.1 | 206 | GUUUAAUGACAUAGUUCAAdTdT | A-1683549.1 | 506 | UUGAACUAUGUCAUUAAACdTdT | GUUUAAUGACAUAGUUCAA | 2956 |
| AD-887138 | A-1683550.1 | 207 | UUUAAUGACAUAGUUCAAGdTdT | A-1683551.1 | 507 | CUUGAACUAUGUCAUUAAAdTdT | UUUAAUGACAUAGUUCAAG | 2957 |
| AD-887139 | A-1683552.1 | 208 | UUAAUGACAUAGUUCAAGUdTdT | A-1683553.1 | 508 | ACUUGAACUAUGUCAUUAAdTdT | UUAAUGACAUAGUUCAAGU | 2958 |
| AD-887140 | A-1683554.1 | 209 | UAAUGACAUAGUUCAAGUUdTdT | A-1683555.1 | 509 | AACUUGAACUAUGUCAUUAdTdT | UAAUGACAUAGUUCAAGUU | 2959 |
| AD-887141 | A-1683556.1 | 210 | AAUGACAUAGUUCAAGUUUdTdT | A-1683557.1 | 510 | AAACUUGAACUAUGUCAUUdTdT | AAUGACAUAGUUCAAGUUU | 2960 |
| AD-887142 | A-1683558.1 | 211 | AUGACAUAGUUCAAGUUUUdTdT | A-1683559.1 | 511 | AAAACUUGAACUAUGUCAUdTdT | AUGACAUAGUUCAAGUUUU | 2961 |
| AD-887143 | A-1683560.1 | 212 | UGACAUAGUUCAAGUUUUCdTdT | A-1683561.1 | 512 | GAAAACUUGAACUAUGUCAdTdT | UGACAUAGUUCAAGUUUUC | 2962 |
| AD-887144 | A-1683562.1 | 213 | GACAUAGUUCAAGUUUUCUdTdT | A-1683563.1 | 513 | AGAAAACUUGAACUAUGUCdTdT | GACAUAGUUCAAGUUUUCU | 2963 |
| AD-887145 | A-1683564.1 | 214 | ACAUAGUUCAAGUUUUCUUdTdT | A-1683565.1 | 514 | AAGAAAACUUGAACUAUGUdTdT | ACAUAGUUCAAGUUUUCUU | 2964 |
| AD-887146 | A-1683566.1 | 215 | CAUAGUUCAAGUUUUCUUGdTdT | A-1683567.1 | 515 | CAAGAAAACUUGAACUAUGdTdT | CAUAGUUCAAGUUUUCUUG | 2965 |
| AD-887147 | A-1683568.1 | 216 | AUAGUUCAAGUUUUCUUGUdTdT | A-1683569.1 | 516 | ACAAGAAAACUUGAACUAUdTdT | AUAGUUCAAGUUUUCUUGU | 2966 |
| AD-887148 | A-1683570.1 | 217 | UAGUUCAAGUUUUCUUGUGdTdT | A-1683571.1 | 517 | CACAAGAAAACUUGAACUAdTdT | UAGUUCAAGUUUUCUUGUG | 2967 |
| AD-887149 | A-1683572.1 | 218 | AGUUCAAGUUUUCUUGUGAdTdT | A-1683573.1 | 518 | UCACAAGAAAACUUGAACUdTdT | AGUUCAAGUUUUCUUGUGA | 2968 |
| AD-887150 | A-1683574.1 | 219 | GUUCAAGUUUUCUUGUGAUdTdT | A-1683575.1 | 519 | AUCACAAGAAAACUUGAACdTdT | GUUCAAGUUUUCUUGUGAU | 2969 |
| AD-887151 | A-1683576.1 | 220 | UUCAAGUUUUCUUGUGAUUdTdT | A-1683577.1 | 520 | AAUCACAAGAAAACUUGAAdTdT | UUCAAGUUUUCUUGUGAUU | 2970 |
| AD-887152 | A-1683578.1 | 221 | UCAAGUUUUCUUGUGAUUUdTdT | A-1683579.1 | 521 | AAAUCACAAGAAAACUUGAdTdT | UCAAGUUUUCUUGUGAUUU | 2971 |
| AD-887153 | A-1683580.1 | 222 | CAAGUUUUCUUGUGAUUUGdTdT | A-1683581.1 | 522 | CAAAUCACAAGAAAACUUGdTdT | CAAGUUUUCUUGUGAUUUG | 2972 |
| AD-887154 | A-1683582.1 | 223 | AAGUUUUCUUGUGAUUUGGdTdT | A-1683583.1 | 523 | CCAAAUCACAAGAAAACUUdTdT | AAGUUUUCUUGUGAUUUGG | 2973 |
| AD-887155 | A-1683584.1 | 224 | AGUUUUCUUGUGAUUUGGGdTdT | A-1683585.1 | 524 | CCCAAAUCACAAGAAAACUdTdT | AGUUUUCUUGUGAUUUGGG | 2974 |
| AD-887156 | A-1683586.1 | 225 | GUUUUCUUGUGAUUUGGGGdTdT | A-1683587.1 | 525 | CCCCAAAUCACAAGAAAACdTdT | GUUUUCUUGUGAUUUGGGG | 2975 |
| AD-887157 | A-1683588.1 | 226 | UGUGAUUUGGGGCAAAAGCdTdT | A-1683589.1 | 526 | GCUUUUGCCCCAAAUCACAdTdT | UGUGAUUUGGGGCAAAAGC | 2976 |
| AD-887158 | A-1683590.1 | 227 | GUGAUUUGGGGCAAAAGCUdTdT | A-1683591.1 | 527 | AGCUUUUGCCCCAAAUCACdTdT | GUGAUUUGGGGCAAAAGCU | 2977 |
| AD-887159 | A-1683592.1 | 228 | UGAUUUGGGGCAAAAGCUGdTdT | A-1683593.1 | 528 | CAGCUUUUGCCCCAAAUCAdTdT | UGAUUUGGGGCAAAAGCUG | 2978 |
| AD-887160 | A-1683594.1 | 229 | UAGUUUCUUCCUGAAAACCdTdT | A-1683595.1 | 529 | GGUUUUCAGGAAGAAACUAdTdT | UAGUUUCUUCCUGAAAACC | 2979 |
| AD-887161 | A-1683596.1 | 230 | AGUUUCUUCCUGAAAACCAdTdT | A-1683597.1 | 530 | UGGUUUUCAGGAAGAAACUdTdT | AGUUUCUUCCUGAAAACCA | 2980 |
| AD-887162 | A-1683598.1 | 231 | GUUUCUUCCUGAAAACCAUdTdT | A-1683599.1 | 531 | AUGGUUUUCAGGAAGAAACdTdT | GUUUCUUCCUGAAAACCAU | 2981 |
| AD-887163 | A-1683600.1 | 232 | UUUCUUCCUGAAAACCAUUdTdT | A-1683601.1 | 532 | AAUGGUUUUCAGGAAGAAAdTdT | UUUCUUCCUGAAAACCAUU | 2982 |
| AD-887164 | A-1683602.1 | 233 | UUCUUCCUGAAAACCAUUGdTdT | A-1683603.1 | 533 | CAAUGGUUUUCAGGAAGAAdTdT | UUCUUCCUGAAAACCAUUG | 2983 |
| AD-887165 | A-1683604.1 | 234 | UCUUCCUGAAAACCAUUGCdTdT | A-1683605.1 | 534 | GCAAUGGUUUUCAGGAAGAdTdT | UCUUCCUGAAAACCAUUGC | 2984 |
| AD-887166 | A-1683606.1 | 235 | CUUCCUGAAAACCAUUGCUdTdT | A-1683607.1 | 535 | AGCAAUGGUUUUCAGGAAGdTdT | CUUCCUGAAAACCAUUGCU | 2985 |
| AD-887167 | A-1683608.1 | 236 | UUCCUGAAAACCAUUGCUCdTdT | A-1683609.1 | 536 | GAGCAAUGGUUUUCAGGAAdTdT | UUCCUGAAAACCAUUGCUC | 2986 |
| AD-887168 | A-1683610.1 | 237 | UCCUGAAAACCAUUGCUCUdTdT | A-1683611.1 | 537 | AGAGCAAUGGUUUUCAGGAdTdT | UCCUGAAAACCAUUGCUCU | 2987 |
| AD-887169 | A-1683612.1 | 238 | CCUGAAAACCAUUGCUCUUdTdT | A-1683613.1 | 538 | AAGAGCAAUGGUUUUCAGGdTdT | CCUGAAAACCAUUGcucuu | 2988 |
| AD-887170 | A-1683614.1 | 239 | CUGAAAACCAUUGCUCUUGdTdT | A-1683615.1 | 539 | CAAGAGCAAUGGUUUUCAGdTdT | CUGAAAACCAUUGCUCUUG | 2989 |
| AD-887171 | A-1683616.1 | 240 | AACCAUUGCUCUUGCAUGUdTdT | A-1683617.1 | 540 | ACAUGCAAGAGCAAUGGUUdTdT | AACCAUUGCUCUUGCAUGU | 2990 |
| AD-887172 | A-1683618.1 | 241 | CCAUUGCUCUUGCAUGUUAdTdT | A-1683619.1 | 541 | UAACAUGCAAGAGCAAUGGdTdT | CCAUUGCUCUUGCAUGUUA | 2991 |
| AD-887173 | A-1683620.1 | 242 | CAUUGCUCUUGCAUGUUACdTdT | A-1683621.1 | 542 | GUAACAUGCAAGAGCAAUGdTdT | CAUUGCUCUUGCAUGUUAC | 2992 |
| AD-887174 | A-1683622.1 | 243 | AUUGCUCUUGCAUGUUACAdTdT | A-1683623.1 | 543 | UGUAACAUGCAAGAGCAAUdTdT | AUUGCUCUUGCAUGUUACA | 2993 |
| AD-887175 | A-1683624.1 | 244 | UUGCUCUUGCAUGUUACAUdTdT | A-1683625.1 | 544 | AUGUAACAUGCAAGAGCAAdTdT | UUGCUCUUGCAUGUUACAU | 2994 |
| AD-887176 | A-1683626.1 | 245 | UGCUCUUGCAUGUUACAUGdTdT | A-1683627.1 | 545 | CAUGUAACAUGCAAGAGCAdTdT | UGCUCUUGCAUGUUACAUG | 2995 |
| AD-887177 | A-1683628.1 | 246 | GCUCUUGCAUGUUACAUGGdTdT | A-1683629.1 | 546 | CCAUGUAACAUGCAAGAGCdTdT | GCUCUUGCAUGUUACAUGG | 2996 |
| AD-887178 | A-1683630.1 | 247 | CUCUUGCAUGUUACAUGGUdTdT | A-1683631.1 | 547 | ACCAUGUAACAUGCAAGAGdTdT | CUCUUGCAUGUUACAUGGU | 2997 |
| AD-887179 | A-1683632.1 | 248 | UCUUGCAUGUUACAUGGUUdTdT | A-1683633.1 | 548 | AACCAUGUAACAUGCAAGAdTdT | UCUUGCAUGUUACAUGGUU | 2998 |
| AD-887180 | A-1683634.1 | 249 | CUUGCAUGUUACAUGGUUAdTdT | A-1683635.1 | 549 | UAACCAUGUAACAUGCAAGdTdT | CUUGCAUGUUACAUGGUUA | 2999 |
| AD-887181 | A-1683636.1 | 250 | UUGCAUGUUACAUGGUUACdTdT | A-1683637.1 | 550 | GUAACCAUGUAACAUGCAAdTdT | UUGCAUGUUACAUGGUUAC | 3000 |
| AD-887182 | A-1683638.1 | 251 | UGCAUGUUACAUGGUUACCdTdT | A-1683639.1 | 551 | GGUAACCAUGUAACAUGCAdTdT | UGCAUGUUACAUGGUUACC | 3001 |
| AD-887183 | A-1683640.1 | 252 | GCAUGUUACAUGGUUACCAdTdT | A-1683641.1 | 552 | UGGUAACCAUGUAACAUGCdTdT | GCAUGUUACAUGGUUACCA | 3002 |
| AD-887184 | A-1683642.1 | 253 | AUGUUACAUGGUUACCACAdTdT | A-1683643.1 | 553 | UGUGGUAACCAUGUAACAUdTdT | AUGUUACAUGGUUACCACA | 3003 |
| AD-887185 | A-1683644.1 | 254 | UGUUACAUGGUUACCACAAdTdT | A-1683645.1 | 554 | UUGUGGUAACCAUGUAACAdTdT | UGUUACAUGGUUACCACAA | 3004 |
| AD-887186 | A-1683646.1 | 255 | UGGUUACCACAAGCCACAAdTdT | A-1683647.1 | 555 | UUGUGGCUUGUGGUAACCAdTdT | UGGUUACCACAAGCCACAA | 3005 |
| AD-887187 | A-1683648.1 | 256 | GGUUACCACAAGCCACAAUdTdT | A-1683649.1 | 556 | AUUGUGGCUUGUGGUAACCdTdT | GGUUACCACAAGCCACAAU | 3006 |
| AD-887188 | A-1683650.1 | 257 | GUUACCACAAGCCACAAUAdTdT | A-1683651.1 | 557 | UAUUGUGGCUUGUGGUAACdTdT | GUUACCACAAGCCACAAUA | 3007 |
| AD-887189 | A-1683652.1 | 258 | AAAAGCAUAACUUCUAAAGdTdT | A-1683653.1 | 558 | CUUUAGAAGUUAUGCUUUUdTdT | AAAAGCAUAACUUCUAAAG | 3008 |
| AD-887190 | A-1683654.1 | 259 | AAAGCAUAACUUCUAAAGGdTdT | A-1683655.1 | 559 | CCUUUAGAAGUUAUGCUUUdTdT | AAAGCAUAACUUCUAAAGG | 3009 |
| AD-887191 | A-1683656.1 | 260 | AAGCAUAACUUCUAAAGGAdTdT | A-1683657.1 | 560 | UCCUUUAGAAGUUAUGCUUdTdT | AAGCAUAACUUCUAAAGGA | 3010 |
| AD-887192 | A-1683658.1 | 261 | AGCAUAACUUCUAAAGGAAdTdT | A-1683659.1 | 561 | UUCCUUUAGAAGUUAUGCUdTdT | AGCAUAACUUCUAAAGGAA | 3011 |
| AD-887193 | A-1683660.1 | 262 | GCAUAACUUCUAAAGGAAGdTdT | A-1683661.1 | 562 | CUUCCUUUAGAAGUUAUGCdTdT | GCAUAACUUCUAAAGGAAG | 3012 |
| AD-887194 | A-1683662.1 | 263 | CAUAACUUCUAAAGGAAGCdTdT | A-1683663.1 | 563 | GCUUCCUUUAGAAGUUAUGdTdT | CAUAACUUCUAAAGGAAGC | 3013 |
| AD-887195 | A-1683664.1 | 264 | AUAACUUCUAAAGGAAGCAdTdT | A-1683665.1 | 564 | UGCUUCCUUUAGAAGUUAUdTdT | AUAACUUCUAAAGGAAGCA | 3014 |
| AD-887196 | A-1683666.1 | 265 | ACUUCUAAAGGAAGCAGAAdTdT | A-1683667.1 | 565 | UUCUGCUUCCUUUAGAAGUdTdT | ACUUCUAAAGGAAGCAGAA | 3015 |
| AD-887197 | A-1683668.1 | 266 | UUCUAAAGGAAGCAGAAUAdTdT | A-1683669.1 | 566 | UAUUCUGCUUCCUUUAGAAdTdT | UUCUAAAGGAAGCAGAAUA | 3016 |
| AD-887198 | A-1683670.1 | 267 | UCUAAAGGAAGCAGAAUAGdTdT | A-1683671.1 | 567 | CUAUUCUGCUUCCUUUAGAdTdT | UCUAAAGGAAGCAGAAUAG | 3017 |
| AD-887199 | A-1683672.1 | 268 | CUAAAGGAAGCAGAAUAGCdTdT | A-1683673.1 | 568 | GCUAUUCUGCUUCCUUUAGdTdT | CUAAAGGAAGCAGAAUAGC | 3018 |
| AD-887200 | A-1683674.1 | 269 | AAAGGAAGCAGAAUAGCUCdTdT | A-1683675.1 | 569 | GAGCUAUUCUGCUUCCUUUdTdT | AAAGGAAGCAGAAUAGCUC | 3019 |
| AD-887201 | A-1683676.1 | 270 | AUAAGUAAGAUGCAUUUACdTdT | A-1683677.1 | 570 | GUAAAUGCAUCUUACUUAUdTdT | AUAAGUAAGAUGCAUUUAC | 3020 |
| AD-887202 | A-1683678.1 | 271 | UAAGUAAGAUGCAUUUACUdTdT | A-1683679.1 | 571 | AGUAAAUGCAUCUUACUUAdTdT | UAAGUAAGAUGCAUUUACU | 3021 |
| AD-887203 | A-1683680.1 | 272 | AAGUAAGAUGCAUUUACUAdTdT | A-1683681.1 | 572 | UAGUAAAUGCAUCUUACUUdTdT | AAGUAAGAUGCAUUUACUA | 3022 |
| AD-887204 | A-1683682.1 | 273 | AGUAAGAUGCAUUUACUACdTdT | A-1683683.1 | 573 | GUAGUAAAUGCAUCUUACUdTdT | AGUAAGAUGCAUUUACUAC | 3023 |
| AD-887205 | A-1683684.1 | 274 | GUAAGAUGCAUUUACUACAdTdT | A-1683685.1 | 574 | UGUAGUAAAUGCAUCUUACdTdT | GUAAGAUGCAUUUACUACA | 3024 |
| AD-887206 | A-1683686.1 | 275 | UAAGAUGCAUUUACUACAGdTdT | A-1683687.1 | 575 | CUGUAGUAAAUGCAUCUUAdTdT | UAAGAUGCAUUUACUACAG | 3025 |
| AD-887207 | A-1683688.1 | 276 | UUGGCUUCUAAUGCUUCAGdTdT | A-1683689.1 | 576 | CUGAAGCAUUAGAAGCCAAdTdT | UUGGCUUCUAAUGCUUCAG | 3026 |
| AD-887208 | A-1683690.1 | 277 | UGGCUUCUAAUGCUUCAGAdTdT | A-1683691.1 | 577 | UCUGAAGCAUUAGAAGCCAdTdT | UGGCUUCUAAUGCUUCAGA | 3027 |
| AD-887209 | A-1683692.1 | 278 | GGCUUCUAAUGCUUCAGAUdTdT | A-1683693.1 | 578 | AUCUGAAGCAUUAGAAGCCdTdT | GGCUUCUAAUGCUUCAGAU | 3028 |
| AD-887210 | A-1683694.1 | 279 | GCUUCUAAUGCUUCAGAUAdTdT | A-1683695.1 | 579 | UAUCUGAAGCAUUAGAAGCdTdT | GCUUCUAAUGCUUCAGAUA | 3029 |
| AD-887211 | A-1683696.1 | 280 | UCUAAUGCUUCAGAUAGAAdTdT | A-1683697.1 | 580 | UUCUAUCUGAAGCAUUAGAdTdT | UCUAAUGCUUCAGAUAGAA | 3030 |
| AD-887212 | A-1683698.1 | 281 | CUAAUGCUUCAGAUAGAAUdTdT | A-1683699.1 | 581 | AUUCUAUCUGAAGCAUUAGdTdT | CUAAUGCUUCAGAUAGAAU | 3031 |
| AD-887213 | A-1683700.1 | 282 | UAAUGCUUCAGAUAGAAUAdTdT | A-1683701.1 | 582 | UAUUCUAUCUGAAGCAUUAdTdT | UAAUGCUUCAGAUAGAAUA | 3032 |
| AD-887214 | A-1683702.1 | 283 | AAUGCUUCAGAUAGAAUACdTdT | A-1683703.1 | 583 | GUAUUCUAUCUGAAGCAUUdTdT | AAUGCUUCAGAUAGAAUAC | 3033 |
| AD-887215 | A-1683704.1 | 284 | AUGCUUCAGAUAGAAUACAdTdT | A-1683705.1 | 584 | UGUAUUCUAUCUGAAGCAUdTdT | AUGCUUCAGAUAGAAUACA | 3034 |
| AD-887216 | A-1683706.1 | 285 | UGCUUCAGAUAGAAUACAGdTdT | A-1683707.1 | 585 | CUGUAUUCUAUCUGAAGCAdTdT | UGCUUCAGAUAGAAUACAG | 3035 |
| AD-887217 | A-1683708.1 | 286 | GCUUCAGAUAGAAUACAGUdTdT | A-1683709.1 | 586 | ACUGUAUUCUAUCUGAAGCdTdT | GCUUCAGAUAGAAUACAGU | 3036 |
| AD-887218 | A-1683710.1 | 287 | CUUCAGAUAGAAUACAGUUdTdT | A-1683711.1 | 587 | AACUGUAUUCUAUCUGAAGdTdT | CUUCAGAUAGAAUACAGUU | 3037 |
| AD-887219 | A-1683712.1 | 288 | UUCAGAUAGAAUACAGUUGdTdT | A-1683713.1 | 588 | CAACUGUAUUCUAUCUGAAdTdT | UUCAGAUAGAAUACAGUUG | 3038 |
| AD-887220 | A-1683714.1 | 289 | UCAGAUAGAAUACAGUUGGdTdT | A-1683715.1 | 589 | CCAACUGUAUUCUAUCUGAdTdT | UCAGAUAGAAUACAGUUGG | 3039 |
| AD-887221 | A-1683716.1 | 290 | CAGAUAGAAUACAGUUGGGdTdT | A-1683717.1 | 590 | CCCAACUGUAUUCUAUCUGdTdT | CAGAUAGAAUACAGUUGGG | 3040 |
| AD-887222 | A-1683718.1 | 291 | CAUUGUGAAAUAAAAUUUUdTdT | A-1683719.1 | 591 | AAAAUUUUAUUUCACAAUGdTdT | CAUUGUGAAAUAAAAUUUU | 3041 |
| AD-887223 | A-1683720.1 | 292 | AUUGUGAAAUAAAAUUUUCdTdT | A-1683721.1 | 592 | GAAAAUUUUAUUUCACAAUdTdT | AUUGUGAAAUAAAAUUUUC | 3042 |
| AD-887224 | A-1683722.1 | 293 | UUGUGAAAUAAAAUUUUCUdTdT | A-1683723.1 | 593 | AGAAAAUUUUAUUUCACAAdTdT | UUGUGAAAUAAAAUUUUCU | 3043 |
| AD-887225 | A-1683724.1 | 294 | UGUGAAAUAAAAUUUUCUUdTdT | A-1683725.1 | 594 | AAGAAAAUUUUAUUUCACAdTdT | UGUGAAAUAAAAUUUUCUU | 3044 |
| AD-887226 | A-1683726.1 | 295 | GUGAAAUAAAAUUUUCUUAdTdT | A-1683727.1 | 595 | UAAGAAAAUUUUAUUUCACdTdT | GUGAAAUAAAAUUUUCUUA | 3045 |
| AD-887227 | A-1683728.1 | 296 | UGAAAUAAAAUUUUCUUACdTdT | A-1683729.1 | 596 | GUAAGAAAAUUUUAUUUCAdTdT | UGAAAUAAAAUUUUCUUAC | 3046 |
| AD-887228 | A-1683730.1 | 297 | GAAAUAAAAUUUUCUUACCdTdT | A-1683731.1 | 597 | GGUAAGAAAAUUUUAUUUCdTdT | GAAAUAAAAUUUUCUUACC | 3047 |
| AD-887229 | A-1683732.1 | 298 | AAAUAAAAUUUUCUUACCCdTdT | A-1683733.1 | 598 | GGGUAAGAAAAUUUUAUUUdTdT | AAAUAAAAUUUUCUUACCC | 3048 |
| AD-887230 | A-1683734.1 | 299 | AAUAAAAUUUUCUUACCCAdTdT | A-1683735.1 | 599 | UGGGUAAGAAAAUUUUAUUdTdT | AAUAAAAUUUUCUUACCCA | 3049 |
| AD-887231 | A-1683736.1 | 300 | AUAAAAUUUUCUUACCCAAdTdT | A-1683737.1 | 600 | UUGGGUAAGAAAAUUUUAUdTdT | AUAAAAUUUUCUUACCCAA | 3050 |

TABLE 2B

Exemplary Human MYOC siRNA Unmodified Single Strands and Duplex Sequences

| Duplex Name | Sense Sequence Name | SEQ ID NO: (Sense) | Sense Sequence (5′-3′) | Antisense Sequence Name | SEQ ID NO: (Antisense) | Antisense Sequence | mRNA Target Range |
|---|---|---|---|---|---|---|---|
| AD-886932 | A-1683138.1 | 601 | CAGUCCCAAUGAAUCCAGC | A-1683139.1 | 901 | GCUGGAUUCAUUGGGACUG | 239-257 |
| AD-886933 | A-1683140.1 | 602 | AGUCCCAAUGAAUCCAGCU | A-1683141.1 | 902 | AGCUGGAUUCAUUGGGACU | 240-258 |
| AD-886934 | A-1683142.1 | 603 | GUCCCAAUGAAUCCAGCUG | A-1683143.1 | 903 | CAGCUGGAUUCAUUGGGAC | 241-259 |
| AD-886935 | A-1683144.1 | 604 | CCAUGUCAGUCAUCCAUAA | A-1683145.1 | 904 | UUAUGGAUGACUGACAUGG | 277-295 |
| AD-886936 | A-1683146.1 | 605 | AUGUCAGUCAUCCAUAACU | A-1683147.1 | 905 | AGUUAUGGAUGACUGACAU | 279-297 |
| AD-886937 | A-1683148.1 | 606 | GCUGGAAACCCAAACCAGA | A-1683149.1 | 906 | UCUGGUUUGGGUUUCCAGC | 467-485 |
| AD-886938 | A-1683150.1 | 607 | AAACCCAAACCAGAGAGUU | A-1683151.1 | 907 | AACUCUCUGGUUUGGGUUU | 472-490 |
| AD-886939 | A-1683152.1 | 608 | AACCCAAACCAGAGAGUUG | A-1683153.1 | 908 | CAACUCUCUGGUUUGGGUU | 473-491 |
| AD-886940 | A-1683154.1 | 609 | CCGAGACAAGUCAGUUCUG | A-1683155.1 | 909 | CAGAACUGACUUGUCUCGG | 515-533 |
| AD-886941 | A-1683156.1 | 610 | GAGACAAGUCAGUUCUGGA | A-1683157.1 | 910 | UCCAGAACUGACUUGUCUC | 517-535 |
| AD-886942 | A-1683158.1 | 611 | AGACAAGUCAGUUCUGGAG | A-1683159.1 | 911 | CUCCAGAACUGACUUGUCU | 518-536 |
| AD-886943 | A-1683160.1 | 612 | CAGUUCUGGAGGAAGAGAA | A-1683161.1 | 912 | UUCUCUUCCUCCAGAACUG | 526-544 |
| AD-886944 | A-1683162.1 | 613 | AGUUCUGGAGGAAGAGAAG | A-1683163.1 | 913 | CUUCUCUUCCUCCAGAACU | 527-545 |
| AD-886945 | A-1683164.1 | 614 | UCUGGAGGAAGAGAAGAAG | A-1683165.1 | 914 | CUUCUUCUCUUCCUCCAGA | 530-548 |
| AD-886946 | A-1683166.1 | 615 | AGGCUCCAGAGAAGUUUCU | A-1683167.1 | 915 | AGAAACUUCUCUGGAGCCU | 668-686 |
| AD-886947 | A-1683168.1 | 616 | GGCUCCAGAGAAGUUUCUA | A-1683169.1 | 916 | UAGAAACUUCUCUGGAGCC | 669-687 |
| AD-886948 | A-1683170.1 | 617 | GCUCCAGAGAAGUUUCUAC | A-1683171.1 | 917 | GUAGAAACUUCUCUGGAGC | 670-688 |
| AD-886949 | A-1683172.1 | 618 | CUCCAGAGAAGUUUCUACG | A-1683173.1 | 918 | CGUAGAAACUUCUCUGGAG | 671-689 |
| AD-886950 | A-1683174.1 | 619 | UGAAGUCCGAGCUAACUGA | A-1683175.1 | 919 | UCAGUUAGCUCGGACUUCA | 721-739 |
| AD-886951 | A-1683176.1 | 620 | GUCCGAGCUAACUGAAGUU | A-1683177.1 | 920 | AACUUCAGUUAGCUCGGAC | 725-743 |
| AD-886952 | A-1683178.1 | 621 | UCCGAGCUAACUGAAGUUC | A-1683179.1 | 921 | GAACUUCAGUUAGCUCGGA | 726-744 |
| AD-886953 | A-1683180.1 | 622 | CCGAGCUAACUGAAGUUCC | A-1683181.1 | 922 | GGAACUUCAGUUAGCUCGG | 727-745 |
| AD-886954 | A-1683182.1 | 623 | CGAGCUAACUGAAGUUCCU | A-1683183.1 | 923 | AGGAACUUCAGUUAGCUCG | 728-746 |
| AD-886955 | A-1683184.1 | 624 | GAGCUAACUGAAGUUCCUG | A-1683185.1 | 924 | CAGGAACUUCAGUUAGCUC | 729-747 |
| AD-886956 | A-1683186.1 | 625 | AGCUAACUGAAGUUCCUGC | A-1683187.1 | 925 | GCAGGAACUUCAGUUAGCU | 730-748 |
| AD-886957 | A-1683188.1 | 626 | GCUAACUGAAGUUCCUGCU | A-1683189.1 | 926 | AGCAGGAACUUCAGUUAGC | 731-749 |
| AD-886958 | A-1683190.1 | 627 | GUUCCUGCUUCCCGAAUUU | A-1683191.1 | 927 | AAAUUCGGGAAGCAGGAAC | 741-759 |
| AD-886959 | A-1683192.1 | 628 | UUCCUGCUUCCCGAAUUUU | A-1683193.1 | 928 | AAAAUUCGGGAAGCAGGAA | 742-760 |
| AD-886960 | A-1683194.1 | 629 | UCCUGCUUCCCGAAUUUUG | A-1683195.1 | 929 | CAAAAUUCGGGAAGCAGGA | 743-761 |
| AD-886961 | A-1683196.1 | 630 | CCUGCUUCCCGAAUUUUGA | A-1683197.1 | 930 | UCAAAAUUCGGGAAGCAGG | 744-762 |
| AD-886962 | A-1683198.1 | 631 | CUGCUUCCCGAAUUUUGAA | A-1683199.1 | 931 | UUCAAAAUUCGGGAAGCAG | 745-763 |
| AD-886963 | A-1683200.1 | 632 | UGCUUCCCGAAUUUUGAAG | A-1683201.1 | 932 | CUUCAAAAUUCGGGAAGCA | 746-764 |
| AD-886964 | A-1683202.1 | 633 | GCUUCCCGAAUUUUGAAGG | A-1683203.1 | 933 | CCUUCAAAAUUCGGGAAGC | 747-765 |
| AD-886965 | A-1683204.1 | 634 | CUUCCCGAAUUUUGAAGGA | A-1683205.1 | 934 | UCCUUCAAAAUUCGGGAAG | 748-766 |
| AD-886966 | A-1683206.1 | 635 | UUCCCGAAUUUUGAAGGAG | A-1683207.1 | 935 | CUCCUUCAAAAUUCGGGAA | 749-767 |
| AD-886967 | A-1683208.1 | 636 | UCCCGAAUUUUGAAGGAGA | A-1683209.1 | 936 | UCUCCUUCAAAAUUCGGGA | 750-768 |
| AD-886968 | A-1683210.1 | 637 | CCCGAAUUUUGAAGGAGAG | A-1683211.1 | 937 | CUCUCCUUCAAAAUUCGGG | 751-769 |
| AD-886969 | A-1683212.1 | 638 | CGGAUGUGGAGAACUAGUU | A-1683213.1 | 938 | AACUAGUUCUCCACAUCCG | 806-824 |
| AD-886970 | A-1683214.1 | 639 | GGAUGUGGAGAACUAGUUU | A-1683215.1 | 939 | AAACUAGUUCUCCACAUCC | 807-825 |
| AD-886971 | A-1683216.1 | 640 | GAUGUGGAGAACUAGUUUG | A-1683217.1 | 940 | CAAACUAGUUCUCCACAUC | 808-826 |
| AD-886972 | A-1683218.1 | 641 | AUGUGGAGAACUAGUUUGG | A-1683219.1 | 941 | CCAAACUAGUUCUCCACAU | 809-827 |
| AD-886973 | A-1683220.1 | 642 | UGUGGAGAACUAGUUUGGG | A-1683221.1 | 942 | CCCAAACUAGUUCUCCACA | 810-828 |
| AD-886974 | A-1683222.1 | 643 | GUGGAGAACUAGUUUGGGU | A-1683223.1 | 943 | ACCCAAACUAGUUCUCCAC | 811-829 |
| AD-886975 | A-1683224.1 | 644 | UGGAGAACUAGUUUGGGUA | A-1683225.1 | 944 | UACCCAAACUAGUUCUCCA | 812-830 |
| AD-886976 | A-1683226.1 | 645 | GGAGAACUAGUUUGGGUAG | A-1683227.1 | 945 | CUACCCAAACUAGUUCUCC | 813-831 |
| AD-886977 | A-1683228.1 | 646 | GAGAACUAGUUUGGGUAGG | A-1683229.1 | 946 | CCUACCCAAACUAGUUCUC | 814-832 |
| AD-886978 | A-1683230.1 | 647 | ACGCUGAGAACAGCAGAAA | A-1683231.1 | 947 | UUUCUGCUGUUCUCAGCGU | 843-861 |
| AD-886979 | A-1683232.1 | 648 | GCUGAGAACAGCAGAAACA | A-1683233.1 | 948 | UGUUUCUGCUGUUCUCAGC | 845-863 |
| AD-886980 | A-1683234.1 | 649 | CUGAGAACAGCAGAAACAA | A-1683235.1 | 949 | UUGUUUCUGCUGUUCUCAG | 846-864 |
| AD-886981 | A-1683236.1 | 650 | UGAGAACAGCAGAAACAAU | A-1683237.1 | 950 | AUUGUUUCUGCUGUUCUCA | 847-865 |
| AD-886982 | A-1683238.1 | 651 | GAGAACAGCAGAAACAAUU | A-1683239.1 | 951 | AAUUGUUUCUGCUGUUCUC | 848-866 |
| AD-886983 | A-1683240.1 | 652 | AGAACAGCAGAAACAAUUA | A-1683241.1 | 952 | UAAUUGUUUCUGCUGUUCU | 849-867 |
| AD-886984 | A-1683242.1 | 653 | GAACAGCAGAAACAAUUAC | A-1683243.1 | 953 | GUAAUUGUUUCUGCUGUUC | 850-868 |
| AD-886985 | A-1683244.1 | 654 | AACAGCAGAAACAAUUACU | A-1683245.1 | 954 | AGUAAUUGUUUCUGCUGUU | 851-869 |
| AD-886986 | A-1683246.1 | 655 | ACAGCAGAAACAAUUACUG | A-1683247.1 | 955 | CAGUAAUUGUUUCUGCUGU | 852-870 |
| AD-886987 | A-1683248.1 | 656 | CAGCAGAAACAAUUACUGG | A-1683249.1 | 956 | CCAGUAAUUGUUUCUGCUG | 853-871 |
| AD-886988 | A-1683250.1 | 657 | AGCAGAAACAAUUACUGGC | A-1683251.1 | 957 | GCCAGUAAUUGUUUCUGCU | 854-872 |
| AD-886989 | A-1683252.1 | 658 | GCAGAAACAAUUACUGGCA | A-1683253.1 | 958 | UGCCAGUAAUUGUUUCUGC | 855-873 |
| AD-886990 | A-1683254.1 | 659 | CAGAAACAAUUACUGGCAA | A-1683255.1 | 959 | UUGCCAGUAAUUGUUUCUG | 856-874 |
| AD-886991 | A-1683256.1 | 660 | AGAAACAAUUACUGGCAAG | A-1683257.1 | 960 | CUUGCCAGUAAUUGUUUCU | 857-875 |
| AD-886992 | A-1683258.1 | 661 | GAAACAAUUACUGGCAAGU | A-1683259.1 | 961 | ACUUGCCAGUAAUUGUUUC | 858-876 |
| AD-886993 | A-1683260.1 | 662 | AACAAUUACUGGCAAGUAU | A-1683261.1 | 962 | AUACUUGCCAGUAAUUGUU | 860-878 |
| AD-886994 | A-1683262.1 | 663 | ACAAUUACUGGCAAGUAUG | A-1683263.1 | 963 | CAUACUUGCCAGUAAUUGU | 861-879 |
| AD-886995 | A-1683264.1 | 664 | CAAUUACUGGCAAGUAUGG | A-1683265.1 | 964 | CCAUACUUGCCAGUAAUUG | 862-880 |
| AD-886996 | A-1683266.1 | 665 | AAUUACUGGCAAGUAUGGU | A-1683267.1 | 965 | ACCAUACUUGCCAGUAAUU | 863-881 |
| AD-886997 | A-1683268.1 | 666 | UACUGGCAAGUAUGGUGUG | A-1683269.1 | 966 | CACACCAUACUUGCCAGUA | 866-884 |
| AD-886998 | A-1683270.1 | 667 | AUGUCCGCCAGGUUUUUGA | A-1683271.1 | 967 | UCAAAAACCUGGCGGACAU | 958-976 |
| AD-886999 | A-1683272.1 | 668 | UGUCCGCCAGGUUUUUGAG | A-1683273.1 | 968 | CUCAAAAACCUGGCGGACA | 959-977 |
| AD-887000 | A-1683274.1 | 669 | GUCCGCCAGGUUUUUGAGU | A-1683275.1 | 969 | ACUCAAAAACCUGGCGGAC | 960-978 |
| AD-887001 | A-1683276.1 | 670 | UCCGCCAGGUUUUUGAGUA | A-1683277.1 | 970 | UACUCAAAAACCUGGCGGA | 961-979 |
| AD-887002 | A-1683278.1 | 671 | CCGCCAGGUUUUUGAGUAU | A-1683279.1 | 971 | AUACUCAAAAACCUGGCGG | 962-980 |
| AD-887003 | A-1683280.1 | 672 | CGCCAGGUUUUUGAGUAUG | A-1683281.1 | 972 | CAUACUCAAAAACCUGGCG | 963-981 |
| AD-887004 | A-1683282.1 | 673 | GCCAGGUUUUUGAGUAUGA | A-1683283.1 | 973 | UCAUACUCAAAAACCUGGC | 964-982 |
| AD-887005 | A-1683284.1 | 674 | CCAGGUUUUUGAGUAUGAC | A-1683285.1 | 974 | GUCAUACUCAAAAACCUGG | 965-983 |
| AD-887006 | A-1683286.1 | 675 | CAGGUUUUUGAGUAUGACC | A-1683287.1 | 975 | GGUCAUACUCAAAAACCUG | 966-984 |
| AD-887007 | A-1683288.1 | 676 | AGGUUUUUGAGUAUGACCU | A-1683289.1 | 976 | AGGUCAUACUCAAAAACCU | 967-985 |
| AD-887008 | A-1683290.1 | 677 | GGUUUUUGAGUAUGACCUC | A-1683291.1 | 977 | GAGGUCAUACUCAAAAACC | 968-986 |
| AD-887009 | A-1683292.1 | 678 | GUUUUUGAGUAUGACCUCA | A-1683293.1 | 978 | UGAGGUCAUACUCAAAAAC | 969-987 |
| AD-887010 | A-1683294.1 | 679 | GACCUCAUCAGCCAGUUUA | A-1683295.1 | 979 | UAAACUGGCUGAUGAGGUC | 981-999 |
| AD-887011 | A-1683296.1 | 680 | ACCUCAUCAGCCAGUUUAU | A-1683297.1 | 980 | AUAAACUGGCUGAUGAGGU | 982-1000 |
| AD-887012 | A-1683298.1 | 681 | CCUCAUCAGCCAGUUUAUG | A-1683299.1 | 981 | CAUAAACUGGCUGAUGAGG | 983-1001 |
| AD-887013 | A-1683300.1 | 682 | CUCAUCAGCCAGUUUAUGC | A-1683301.1 | 982 | GCAUAAACUGGCUGAUGAG | 984-1002 |
| AD-887014 | A-1683302.1 | 683 | UCAUCAGCCAGUUUAUGCA | A-1683303.1 | 983 | UGCAUAAACUGGCUGAUGA | 985-1003 |
| AD-887015 | A-1683304.1 | 684 | UCAGCCAGUUUAUGCAGGG | A-1683305.1 | 984 | CCCUGCAUAAACUGGCUGA | 988-1006 |
| AD-887016 | A-1683306.1 | 685 | GGCUACCCUUCUAAGGUUC | A-1683307.1 | 985 | GAACCUUAGAAGGGUAGCC | 1005-1023 |
| AD-887017 | A-1683308.1 | 686 | GCUACCCUUCUAAGGUUCA | A-1683309.1 | 986 | UGAACCUUAGAAGGGUAGC | 1006-1024 |
| AD-887018 | A-1683310.1 | 687 | CUACCCUUCUAAGGUUCAC | A-1683311.1 | 987 | GUGAACCUUAGAAGGGUAG | 1007-1025 |
| AD-887019 | A-1683312.1 | 688 | UACCCUUCUAAGGUUCACA | A-1683313.1 | 988 | UGUGAACCUUAGAAGGGUA | 1008-1026 |
| AD-887020 | A-1683314.1 | 689 | ACCCUUCUAAGGUUCACAU | A-1683315.1 | 989 | AUGUGAACCUUAGAAGGGU | 1009-1027 |
| AD-887021 | A-1683316.1 | 690 | CCCUUCUAAGGUUCACAUA | A-1683317.1 | 990 | UAUGUGAACCUUAGAAGGG | 1010-1028 |
| AD-887022 | A-1683318.1 | 691 | CCUUCUAAGGUUCACAUAC | A-1683319.1 | 991 | GUAUGUGAACCUUAGAAGG | 1011-1029 |
| AD-887023 | A-1683320.1 | 692 | CUUCUAAGGUUCACAUACU | A-1683321.1 | 992 | AGUAUGUGAACCUUAGAAG | 1012-1030 |
| AD-887024 | A-1683322.1 | 693 | UUCUAAGGUUCACAUACUG | A-1683323.1 | 993 | CAGUAUGUGAACCUUAGAA | 1013-1031 |
| AD-887025 | A-1683324.1 | 694 | CUAAGGUUCACAUACUGCC | A-1683325.1 | 994 | GGCAGUAUGUGAACCUUAG | 1015-1033 |
| AD-887026 | A-1683326.1 | 695 | UAAGGUUCACAUACUGCCU | A-1683327.1 | 995 | AGGCAGUAUGUGAACCUUA | 1016-1034 |
| AD-887027 | A-1683328.1 | 696 | GAGUCCAGAACUGUCAUAA | A-1683329.1 | 996 | UUAUGACAGUUCUGGACUC | 1095-1113 |
| AD-887028 | A-1683330.1 | 697 | AGUCCAGAACUGUCAUAAG | A-1683331.1 | 997 | CUUAUGACAGUUCUGGACU | 1096-1114 |
| AD-887029 | A-1683332.1 | 698 | GUCCAGAACUGUCAUAAGA | A-1683333.1 | 998 | UCUUAUGACAGUUCUGGAC | 1097-1115 |
| AD-887030 | A-1683334.1 | 699 | UCCAGAACUGUCAUAAGAU | A-1683335.1 | 999 | AUCUUAUGACAGUUCUGGA | 1098-1116 |
| AD-887031 | A-1683336.1 | 700 | CCAGAACUGUCAUAAGAUA | A-1683337.1 | 1000 | UAUCUUAUGACAGUUCUGG | 1099-1117 |
| AD-887032 | A-1683338.1 | 701 | CAGAACUGUCAUAAGAUAU | A-1683339.1 | 1001 | AUAUCUUAUGACAGUUCUG | 1100-1118 |
| AD-887033 | A-1683340.1 | 702 | AGAACUGUCAUAAGAUAUG | A-1683341.1 | 1002 | CAUAUCUUAUGACAGUUCU | 1101-1119 |
| AD-887034 | A-1683342.1 | 703 | GAACUGUCAUAAGAUAUGA | A-1683343.1 | 1003 | UCAUAUCUUAUGACAGUUC | 1102-1120 |
| AD-887035 | A-1683344.1 | 704 | AACUGUCAUAAGAUAUGAG | A-1683345.1 | 1004 | CUCAUAUCUUAUGACAGUU | 1103-1121 |
| AD-887036 | A-1683346.1 | 705 | ACUGUCAUAAGAUAUGAGC | A-1683347.1 | 1005 | GCUCAUAUCUUAUGACAGU | 1104-1122 |
| AD-887037 | A-1683348.1 | 706 | CUGUCAUAAGAUAUGAGCU | A-1683349.1 | 1006 | AGCUCAUAUCUUAUGACAG | 1105-1123 |
| AD-887038 | A-1683350.1 | 707 | UGUCAUAAGAUAUGAGCUG | A-1683351.1 | 1007 | CAGCUCAUAUCUUAUGACA | 1106-1124 |
| AD-887039 | A-1683352.1 | 708 | GUCAUAAGAUAUGAGCUGA | A-1683353.1 | 1008 | UCAGCUCAUAUCUUAUGAC | 1107-1125 |
| AD-887040 | A-1683354.1 | 709 | AAGAUAUGAGCUGAAUACC | A-1683355.1 | 1009 | GGUAUUCAGCUCAUAUCUU | 1112-1130 |
| AD-887041 | A-1683356.1 | 710 | UGAAUACCGAGACAGUGAA | A-1683357.1 | 1010 | UUCACUGUCUCGGUAUUCA | 1123-1141 |
| AD-887042 | A-1683358.1 | 711 | UGAAGGCUGAGAAGGAAAU | A-1683359.1 | 1011 | AUUUCCUUCUCAGCCUUCA | 1138-1156 |
| AD-887043 | A-1683360.1 | 712 | GGCUGAGAAGGAAAUCCCU | A-1683361.1 | 1012 | AGGGAUUUCCUUCUCAGCC | 1142-1160 |
| AD-887044 | A-1683362.1 | 713 | CGGACAGUUCCCGUAUUCU | A-1683363.1 | 1013 | AGAAUACGGGAACUGUCCG | 1175-1193 |
| AD-887045 | A-1683364.1 | 714 | GGACAGUUCCCGUAUUCUU | A-1683365.1 | 1014 | AAGAAUACGGGAACUGUCC | 1176-1194 |
| AD-887046 | A-1683366.1 | 715 | GACAGUUCCCGUAUUCUUG | A-1683367.1 | 1015 | CAAGAAUACGGGAACUGUC | 1177-1195 |
| AD-887047 | A-1683368.1 | 716 | ACAGUUCCCGUAUUCUUGG | A-1683369.1 | 1016 | CCAAGAAUACGGGAACUGU | 1178-1196 |
| AD-887048 | A-1683370.1 | 717 | GCCUCUGGGUCAUUUACAG | A-1683371.1 | 1017 | CUGUAAAUGACCCAGAGGC | 1237-1255 |
| AD-887049 | A-1683372.1 | 718 | CCAUUGUCCUCUCCAAACU | A-1683373.1 | 1018 | AGUUUGGAGAGGACAAUGG | 1276-1294 |
| AD-887050 | A-1683374.1 | 719 | CAUUGUCCUCUCCAAACUG | A-1683375.1 | 1019 | CAGUUUGGAGAGGACAAUG | 1277-1295 |
| AD-887051 | A-1683376.1 | 720 | AUUGUCCUCUCCAAACUGA | A-1683377.1 | 1020 | UCAGUUUGGAGAGGACAAU | 1278-1296 |
| AD-887052 | A-1683378.1 | 721 | UUGUCCUCUCCAAACUGAA | A-1683379.1 | 1021 | UUCAGUUUGGAGAGGACAA | 1279-1297 |
| AD-887053 | A-1683380.1 | 722 | UCUCCAAACUGAACCCAGA | A-1683381.1 | 1022 | UCUGGGUUCAGUUUGGAGA | 1285-1303 |
| AD-887054 | A-1683382.1 | 723 | CAAACUGAACCCAGAGAAU | A-1683383.1 | 1023 | AUUCUCUGGGUUCAGUUUG | 1289-1307 |
| AD-887055 | A-1683384.1 | 724 | AAACUGAACCCAGAGAAUC | A-1683385.1 | 1024 | GAUUCUCUGGGUUCAGUUU | 1290-1308 |
| AD-887056 | A-1683386.1 | 725 | CCCAGAGAAUCUGGAACUC | A-1683387.1 | 1025 | GAGUUCCAGAUUCUCUGGG | 1298-1316 |
| AD-887057 | A-1683388.1 | 726 | GUCGCCAAUGCCUUCAUCA | A-1683389.1 | 1026 | UGAUGAAGGCAUUGGCGAC | 1353-1371 |
| AD-887058 | A-1683390.1 | 727 | CCAAUGCCUUCAUCAUCUG | A-1683391.1 | 1027 | CAGAUGAUGAAGGCAUUGG | 1357-1375 |
| AD-887059 | A-1683392.1 | 728 | AAUGCCUUCAUCAUCUGUG | A-1683393.1 | 1028 | CACAGAUGAUGAAGGCAUU | 1359-1377 |
| AD-887060 | A-1683394.1 | 729 | AUGCCUUCAUCAUCUGUGG | A-1683395.1 | 1029 | CCACAGAUGAUGAAGGCAU | 1360-1378 |
| AD-887061 | A-1683396.1 | 730 | GUGGCACCUUGUACACCGU | A-1683397.1 | 1030 | ACGGUGUACAAGGUGCCAC | 1375-1393 |
| AD-887062 | A-1683398.1 | 731 | ACCGUCAACUUUGCUUAUG | A-1683399.1 | 1031 | CAUAAGCAAAGUUGACGGU | 1419-1437 |
| AD-887063 | A-1683400.1 | 732 | CCGUCAACUUUGCUUAUGA | A-1683401.1 | 1032 | UCAUAAGCAAAGUUGACGG | 1420-1438 |
| AD-887064 | A-1683402.1 | 733 | CGUCAACUUUGCUUAUGAC | A-1683403.1 | 1033 | GUCAUAAGCAAAGUUGACG | 1421-1439 |
| AD-887065 | A-1683404.1 | 734 | GUCAACUUUGCUUAUGACA | A-1683405.1 | 1034 | UGUCAUAAGCAAAGUUGAC | 1422-1440 |
| AD-887066 | A-1683406.1 | 735 | UCAACUUUGCUUAUGACAC | A-1683407.1 | 1035 | GUGUCAUAAGCAAAGUUGA | 1423-1441 |
| AD-887067 | A-1683408.1 | 736 | CCCUGACCAUCCCAUUCAA | A-1683409.1 | 1036 | UUGAAUGGGAUGGUCAGGG | 1462-1480 |
| AD-887068 | A-1683410.1 | 737 | CCUGACCAUCCCAUUCAAG | A-1683411.1 | 1037 | CUUGAAUGGGAUGGUCAGG | 1463-1481 |
| AD-887069 | A-1683412.1 | 738 | CUGACCAUCCCAUUCAAGA | A-1683413.1 | 1038 | UCUUGAAUGGGAUGGUCAG | 1464-1482 |
| AD-887070 | A-1683414.1 | 739 | CCAUCCCAUUCAAGAACCG | A-1683415.1 | 1039 | CGGUUCUUGAAUGGGAUGG | 1468-1486 |
| AD-887071 | A-1683416.1 | 740 | AUCCCAUUCAAGAACCGCU | A-1683417.1 | 1040 | AGCGGUUCUUGAAUGGGAU | 1470-1488 |
| AD-887072 | A-1683418.1 | 741 | UCCCAUUCAAGAACCGCUA | A-1683419.1 | 1041 | UAGCGGUUCUUGAAUGGGA | 1471-1489 |
| AD-887073 | A-1683420.1 | 742 | CCCAUUCAAGAACCGCUAU | A-1683421.1 | 1042 | AUAGCGGUUCUUGAAUGGG | 1472-1490 |
| AD-887074 | A-1683422.1 | 743 | AAGUACAGCAGCAUGAUUG | A-1683423.1 | 1043 | CAAUCAUGCUGCUGUACUU | 1491-1509 |
| AD-887075 | A-1683424.1 | 744 | AGUACAGCAGCAUGAUUGA | A-1683425.1 | 1044 | UCAAUCAUGCUGCUGUACU | 1492-1510 |
| AD-887076 | A-1683426.1 | 745 | ACAGCAGCAUGAUUGACUA | A-1683427.1 | 1045 | UAGUCAAUCAUGCUGCUGU | 1495-1513 |
| AD-887077 | A-1683428.1 | 746 | CAGCAGCAUGAUUGACUAC | A-1683429.1 | 1046 | GUAGUCAAUCAUGCUGCUG | 1496-1514 |
| AD-887078 | A-1683430.1 | 747 | AGCAGCAUGAUUGACUACA | A-1683431.1 | 1047 | UGUAGUCAAUCAUGCUGCU | 1497-1515 |
| AD-887079 | A-1683432.1 | 748 | GCAGCAUGAUUGACUACAA | A-1683433.1 | 1048 | UUGUAGUCAAUCAUGCUGC | 1498-1516 |
| AD-887080 | A-1683434.1 | 749 | CAGCAUGAUUGACUACAAC | A-1683435.1 | 1049 | GUUGUAGUCAAUCAUGCUG | 1499-1517 |
| AD-887081 | A-1683436.1 | 750 | AGCAUGAUUGACUACAACC | A-1683437.1 | 1050 | GGUUGUAGUCAAUCAUGCU | 1500-1518 |
| AD-887082 | A-1683438.1 | 751 | GCAUGAUUGACUACAACCC | A-1683439.1 | 1051 | GGGUUGUAGUCAAUCAUGC | 1501-1519 |
| AD-887083 | A-1683440.1 | 752 | UCUUUGCCUGGGACAACUU | A-1683441.1 | 1052 | AAGUUGUCCCAGGCAAAGA | 1534-1552 |
| AD-887084 | A-1683442.1 | 753 | UUGCCUGGGACAACUUGAA | A-1683443.1 | 1053 | UUCAAGUUGUCCCAGGCAA | 1537-1555 |
| AD-887085 | A-1683444.1 | 754 | CCUGGGACAACUUGAACAU | A-1683445.1 | 1054 | AUGUUCAAGUUGUCCCAGG | 1540-1558 |
| AD-887086 | A-1683446.1 | 755 | CUGGGACAACUUGAACAUG | A-1683447.1 | 1055 | CAUGUUCAAGUUGUCCCAG | 1541-1559 |
| AD-887087 | A-1683448.1 | 756 | UGGGACAACUUGAACAUGG | A-1683449.1 | 1056 | CCAUGUUCAAGUUGUCCCA | 1542-1560 |
| AD-887088 | A-1683450.1 | 757 | GGGACAACUUGAACAUGGU | A-1683451.1 | 1057 | ACCAUGUUCAAGUUGUCCC | 1543-1561 |
| AD-887089 | A-1683452.1 | 758 | GGACAACUUGAACAUGGUC | A-1683453.1 | 1058 | GACCAUGUUCAAGUUGUCC | 1544-1562 |
| AD-887090 | A-1683454.1 | 759 | GACAACUUGAACAUGGUCA | A-1683455.1 | 1059 | UGACCAUGUUCAAGUUGUC | 1545-1563 |
| AD-887091 | A-1683456.1 | 760 | ACAACUUGAACAUGGUCAC | A-1683457.1 | 1060 | GUGACCAUGUUCAAGUUGU | 1546-1564 |
| AD-887092 | A-1683458.1 | 761 | CAACUUGAACAUGGUCACU | A-1683459.1 | 1061 | AGUGACCAUGUUCAAGUUG | 1547-1565 |
| AD-887093 | A-1683460.1 | 762 | ACUUGAACAUGGUCACUUA | A-1683461.1 | 1062 | UAAGUGACCAUGUUCAAGU | 1549-1567 |
| AD-887094 | A-1683462.1 | 763 | CUUGAACAUGGUCACUUAU | A-1683463.1 | 1063 | AUAAGUGACCAUGUUCAAG | 1550-1568 |
| AD-887095 | A-1683464.1 | 764 | UUGAACAUGGUCACUUAUG | A-1683465.1 | 1064 | CAUAAGUGACCAUGUUCAA | 1551-1569 |
| AD-887096 | A-1683466.1 | 765 | UGAACAUGGUCACUUAUGA | A-1683467.1 | 1065 | UCAUAAGUGACCAUGUUCA | 1552-1570 |
| AD-887097 | A-1683468.1 | 766 | GAACAUGGUCACUUAUGAC | A-1683469.1 | 1066 | GUCAUAAGUGACCAUGUUC | 1553-1571 |
| AD-887098 | A-1683470.1 | 767 | AACAUGGUCACUUAUGACA | A-1683471.1 | 1067 | UGUCAUAAGUGACCAUGUU | 1554-1572 |
| AD-887099 | A-1683472.1 | 768 | ACAUGGUCACUUAUGACAU | A-1683473.1 | 1068 | AUGUCAUAAGUGACCAUGU | 1555-1573 |
| AD-887100 | A-1683474.1 | 769 | CAUGGUCACUUAUGACAUC | A-1683475.1 | 1069 | GAUGUCAUAAGUGACCAUG | 1556-1574 |
| AD-887101 | A-1683476.1 | 770 | UGGUCACUUAUGACAUCAA | A-1683477.1 | 1070 | UUGAUGUCAUAAGUGACCA | 1558-1576 |
| AD-887102 | A-1683478.1 | 771 | GGUCACUUAUGACAUCAAG | A-1683479.1 | 1071 | CUUGAUGUCAUAAGUGACC | 1559-1577 |
| AD-887103 | A-1683480.1 | 772 | GUCACUUAUGACAUCAAGC | A-1683481.1 | 1072 | GCUUGAUGUCAUAAGUGAC | 1560-1578 |
| AD-887104 | A-1683482.1 | 773 | ACAUCAAGCUCUCCAAGAU | A-1683483.1 | 1073 | AUCUUGGAGAGCUUGAUGU | 1570-1588 |
| AD-887105 | A-1683484.1 | 774 | AUCAAGCUCUCCAAGAUGU | A-1683485.1 | 1074 | ACAUCUUGGAGAGCUUGAU | 1572-1590 |
| AD-887106 | A-1683486.1 | 775 | UCAAGCUCUCCAAGAUGUG | A-1683487.1 | 1075 | CACAUCUUGGAGAGCUUGA | 1573-1591 |
| AD-887107 | A-1683488.1 | 776 | AGCUCUCCAAGAUGUGAAA | A-1683489.1 | 1076 | UUUCACAUCUUGGAGAGCU | 1576-1594 |
| AD-887108 | A-1683490.1 | 777 | GCUCUCCAAGAUGUGAAAA | A-1683491.1 | 1077 | UUUUCACAUCUUGGAGAGC | 1577-1595 |
| AD-887109 | A-1683492.1 | 778 | CUCUCCAAGAUGUGAAAAG | A-1683493.1 | 1078 | CUUUUCACAUCUUGGAGAG | 1578-1596 |
| AD-887110 | A-1683494.1 | 779 | UCUCCAAGAUGUGAAAAGC | A-1683495.1 | 1079 | GCUUUUCACAUCUUGGAGA | 1579-1597 |
| AD-887111 | A-1683496.1 | 780 | UCCAAGAUGUGAAAAGCCU | A-1683497.1 | 1080 | AGGCUUUUCACAUCUUGGA | 1581-1599 |
| AD-887112 | A-1683498.1 | 781 | CCAAGAUGUGAAAAGCCUC | A-1683499.1 | 1081 | GAGGCUUUUCACAUCUUGG | 1582-1600 |
| AD-887113 | A-1683500.1 | 782 | GGAUGAACAUGGUCACCAU | A-1683501.1 | 1082 | AUGGUGACCAUGUUCAUCC | 1726-1744 |
| AD-887114 | A-1683502.1 | 783 | CAGGAAUUGUAGUCUGAGG | A-1683503.1 | 1083 | CCUCAGACUACAAUUCCUG | 1754-1772 |
| AD-887115 | A-1683504.1 | 784 | AGGAAUUGUAGUCUGAGGG | A-1683505.1 | 1084 | CCCUCAGACUACAAUUCCU | 1755-1773 |
| AD-887116 | A-1683506.1 | 785 | UCUUCUGUCAGCAUUUAUG | A-1683507.1 | 1085 | CAUAAAUGCUGACAGAAGA | 1806-1824 |
| AD-887117 | A-1683508.1 | 786 | CUUCUGUCAGCAUUUAUGG | A-1683509.1 | 1086 | CCAUAAAUGCUGACAGAAG | 1807-1825 |
| AD-887118 | A-1683510.1 | 787 | UUCUGUCAGCAUUUAUGGG | A-1683511.1 | 1087 | CCCAUAAAUGCUGACAGAA | 1808-1826 |
| AD-887119 | A-1683512.1 | 788 | CUGUCAGCAUUUAUGGGAU | A-1683513.1 | 1088 | AUCCCAUAAAUGCUGACAG | 1810-1828 |
| AD-887120 | A-1683514.1 | 789 | UGUCAGCAUUUAUGGGAUG | A-1683515.1 | 1089 | CAUCCCAUAAAUGCUGACA | 1811-1829 |
| AD-887121 | A-1683516.1 | 790 | GUCAGCAUUUAUGGGAUGU | A-1683517.1 | 1090 | ACAUCCCAUAAAUGCUGAC | 1812-1830 |
| AD-887122 | A-1683518.1 | 791 | UCAGCAUUUAUGGGAUGUU | A-1683519.1 | 1091 | AACAUCCCAUAAAUGCUGA | 1813-1831 |
| AD-887123 | A-1683520.1 | 792 | CAGCAUUUAUGGGAUGUUU | A-1683521.1 | 1092 | AAACAUCCCAUAAAUGCUG | 1814-1832 |
| AD-887124 | A-1683522.1 | 793 | AGCAUUUAUGGGAUGUUUA | A-1683523.1 | 1093 | UAAACAUCCCAUAAAUGCU | 1815-1833 |
| AD-887125 | A-1683524.1 | 794 | GCAUUUAUGGGAUGUUUAA | A-1683525.1 | 1094 | UUAAACAUCCCAUAAAUGC | 1816-1834 |
| AD-887126 | A-1683526.1 | 795 | CAUUUAUGGGAUGUUUAAU | A-1683527.1 | 1095 | AUUAAACAUCCCAUAAAUG | 1817-1835 |
| AD-887127 | A-1683528.1 | 796 | AUUUAUGGGAUGUUUAAUG | A-1683529.1 | 1096 | CAUUAAACAUCCCAUAAAU | 1818-1836 |
| AD-887128 | A-1683530.1 | 797 | UUUAUGGGAUGUUUAAUGA | A-1683531.1 | 1097 | UCAUUAAACAUCCCAUAAA | 1819-1837 |
| AD-887129 | A-1683532.1 | 798 | UUAUGGGAUGUUUAAUGAC | A-1683533.1 | 1098 | GUCAUUAAACAUCCCAUAA | 1820-1838 |
| AD-887130 | A-1683534.1 | 799 | AUGGGAUGUUUAAUGACAU | A-1683535.1 | 1099 | AUGUCAUUAAACAUCCCAU | 1822-1840 |
| AD-887131 | A-1683536.1 | 800 | UGGGAUGUUUAAUGACAUA | A-1683537.1 | 1100 | UAUGUCAUUAAACAUCCCA | 1823-1841 |
| AD-887132 | A-1683538.1 | 801 | GGGAUGUUUAAUGACAUAG | A-1683539.1 | 1101 | CUAUGUCAUUAAACAUCCC | 1824-1842 |
| AD-887133 | A-1683540.1 | 802 | GGAUGUUUAAUGACAUAGU | A-1683541.1 | 1102 | ACUAUGUCAUUAAACAUCC | 1825-1843 |
| AD-887134 | A-1683542.1 | 803 | GAUGUUUAAUGACAUAGUU | A-1683543.1 | 1103 | AACUAUGUCAUUAAACAUC | 1826-1844 |
| AD-887135 | A-1683544.1 | 804 | AUGUUUAAUGACAUAGUUC | A-1683545.1 | 1104 | GAACUAUGUCAUUAAACAU | 1827-1845 |
| AD-887136 | A-1683546.1 | 805 | UGUUUAAUGACAUAGUUCA | A-1683547.1 | 1105 | UGAACUAUGUCAUUAAACA | 1828-1846 |
| AD-887137 | A-1683548.1 | 806 | GUUUAAUGACAUAGUUCAA | A-1683549.1 | 1106 | UUGAACUAUGUCAUUAAAC | 1829-1847 |
| AD-887138 | A-1683550.1 | 807 | UUUAAUGACAUAGUUCAAG | A-1683551.1 | 1107 | CUUGAACUAUGUCAUUAAA | 1830-1848 |
| AD-887139 | A-1683552.1 | 808 | UUAAUGACAUAGUUCAAGU | A-1683553.1 | 1108 | ACUUGAACUAUGUCAUUAA | 1831-1849 |
| AD-887140 | A-1683554.1 | 809 | UAAUGACAUAGUUCAAGUU | A-1683555.1 | 1109 | AACUUGAACUAUGUCAUUA | 1832-1850 |
| AD-887141 | A-1683556.1 | 810 | AAUGACAUAGUUCAAGUUU | A-1683557.1 | 1110 | AAACUUGAACUAUGUCAUU | 1833-1851 |
| AD-887142 | A-1683558.1 | 811 | AUGACAUAGUUCAAGUUUU | A-1683559.1 | 1111 | AAAACUUGAACUAUGUCAU | 1834-1852 |
| AD-887143 | A-1683560.1 | 812 | UGACAUAGUUCAAGUUUUC | A-1683561.1 | 1112 | GAAAACUUGAACUAUGUCA | 1835-1853 |
| AD-887144 | A-1683562.1 | 813 | GACAUAGUUCAAGUUUUCU | A-1683563.1 | 1113 | AGAAAACUUGAACUAUGUC | 1836-1854 |
| AD-887145 | A-1683564.1 | 814 | ACAUAGUUCAAGUUUUCUU | A-1683565.1 | 1114 | AAGAAAACUUGAACUAUGU | 1837-1855 |
| AD-887146 | A-1683566.1 | 815 | CAUAGUUCAAGUUUUCUUG | A-1683567.1 | 1115 | CAAGAAAACUUGAACUAUG | 1838-1856 |
| AD-887147 | A-1683568.1 | 816 | AUAGUUCAAGUUUUCUUGU | A-1683569.1 | 1116 | ACAAGAAAACUUGAACUAU | 1839-1857 |
| AD-887148 | A-1683570.1 | 817 | UAGUUCAAGUUUUCUUGUG | A-1683571.1 | 1117 | CACAAGAAAACUUGAACUA | 1840-1858 |
| AD-887149 | A-1683572.1 | 818 | AGUUCAAGUUUUCUUGUGA | A-1683573.1 | 1118 | UCACAAGAAAACUUGAACU | 1841-1859 |
| AD-887150 | A-1683574.1 | 819 | GUUCAAGUUUUCUUGUGAU | A-1683575.1 | 1119 | AUCACAAGAAAACUUGAAC | 1842-1860 |
| AD-887151 | A-1683576.1 | 820 | UUCAAGUUUUCUUGUGAUU | A-1683577.1 | 1120 | AAUCACAAGAAAACUUGAA | 1843-1861 |
| AD-887152 | A-1683578.1 | 821 | UCAAGUUUUCUUGUGAUUU | A-1683579.1 | 1121 | AAAUCACAAGAAAACUUGA | 1844-1862 |
| AD-887153 | A-1683580.1 | 822 | CAAGUUUUCUUGUGAUUUG | A-1683581.1 | 1122 | CAAAUCACAAGAAAACUUG | 1845-1863 |
| AD-887154 | A-1683582.1 | 823 | AAGUUUUCUUGUGAUUUGG | A-1683583.1 | 1123 | CCAAAUCACAAGAAAACUU | 1846-1864 |
| AD-887155 | A-1683584.1 | 824 | AGUUUUCUUGUGAUUUGGG | A-1683585.1 | 1124 | CCCAAAUCACAAGAAAACU | 1847-1865 |
| AD-887156 | A-1683586.1 | 825 | GUUUUCUUGUGAUUUGGGG | A-1683587.1 | 1125 | CCCCAAAUCACAAGAAAAC | 1848-1866 |
| AD-887157 | A-1683588.1 | 826 | UGUGAUUUGGGGCAAAAGC | A-1683589.1 | 1126 | GCUUUUGCCCCAAAUCACA | 1855-1873 |
| AD-887158 | A-1683590.1 | 827 | GUGAUUUGGGGCAAAAGCU | A-1683591.1 | 1127 | AGCUUUUGCCCCAAAUCAC | 1856-1874 |
| AD-887159 | A-1683592.1 | 828 | UGAUUUGGGGCAAAAGCUG | A-1683593.1 | 1128 | CAGCUUUUGCCCCAAAUCA | 1857-1875 |
| AD-887160 | A-1683594.1 | 829 | UAGUUUCUUCCUGAAAACC | A-1683595.1 | 1129 | GGUUUUCAGGAAGAAACUA | 1886-1904 |
| AD-887161 | A-1683596.1 | 830 | AGUUUCUUCCUGAAAACCA | A-1683597.1 | 1130 | UGGUUUUCAGGAAGAAACU | 1887-1905 |
| AD-887162 | A-1683598.1 | 831 | GUUUCUUCCUGAAAACCAU | A-1683599.1 | 1131 | AUGGUUUUCAGGAAGAAAC | 1888-1906 |
| AD-887163 | A-1683600.1 | 832 | UUUCUUCCUGAAAACCAUU | A-1683601.1 | 1132 | AAUGGUUUUCAGGAAGAAA | 1889-1907 |
| AD-887164 | A-1683602.1 | 833 | UUCUUCCUGAAAACCAUUG | A-1683603.1 | 1133 | CAAUGGUUUUCAGGAAGAA | 1890-1908 |
| AD-887165 | A-1683604.1 | 834 | UCUUCCUGAAAACCAUUGC | A-1683605.1 | 1134 | GCAAUGGUUUUCAGGAAGA | 1891-1909 |
| AD-887166 | A-1683606.1 | 835 | CUUCCUGAAAACCAUUGCU | A-1683607.1 | 1135 | AGCAAUGGUUUUCAGGAAG | 1892-1910 |
| AD-887167 | A-1683608.1 | 836 | UUCCUGAAAACCAUUGCUC | A-1683609.1 | 1136 | GAGCAAUGGUUUUCAGGAA | 1893-1911 |
| AD-887168 | A-1683610.1 | 837 | UCCUGAAAACCAUUGCUCU | A-1683611.1 | 1137 | AGAGCAAUGGUUUUCAGGA | 1894-1912 |
| AD-887169 | A-1683612.1 | 838 | CCUGAAAACCAUUGCUCUU | A-1683613.1 | 1138 | AAGAGCAAUGGUUUUCAGG | 1895-1913 |
| AD-887170 | A-1683614.1 | 839 | CUGAAAACCAUUGCUCUUG | A-1683615.1 | 1139 | CAAGAGCAAUGGUUUUCAG | 1896-1914 |
| AD-887171 | A-1683616.1 | 840 | AACCAUUGCUCUUGCAUGU | A-1683617.1 | 1140 | ACAUGCAAGAGCAAUGGUU | 1901-1919 |
| AD-887172 | A-1683618.1 | 841 | CCAUUGCUCUUGCAUGUUA | A-1683619.1 | 1141 | UAACAUGCAAGAGCAAUGG | 1903-1921 |
| AD-887173 | A-1683620.1 | 842 | CAUUGCUCUUGCAUGUUAC | A-1683621.1 | 1142 | GUAACAUGCAAGAGCAAUG | 1904-1922 |
| AD-887174 | A-1683622.1 | 843 | AUUGCUCUUGCAUGUUACA | A-1683623.1 | 1143 | UGUAACAUGCAAGAGCAAU | 1905-1923 |
| AD-887175 | A-1683624.1 | 844 | UUGCUCUUGCAUGUUACAU | A-1683625.1 | 1144 | AUGUAACAUGCAAGAGCAA | 1906-1924 |
| AD-887176 | A-1683626.1 | 845 | UGCUCUUGCAUGUUACAUG | A-1683627.1 | 1145 | CAUGUAACAUGCAAGAGCA | 1907-1925 |
| AD-887177 | A-1683628.1 | 846 | GCUCUUGCAUGUUACAUGG | A-1683629.1 | 1146 | CCAUGUAACAUGCAAGAGC | 1908-1926 |
| AD-887178 | A-1683630.1 | 847 | CUCUUGCAUGUUACAUGGU | A-1683631.1 | 1147 | ACCAUGUAACAUGCAAGAG | 1909-1927 |
| AD-887179 | A-1683632.1 | 848 | UCUUGCAUGUUACAUGGUU | A-1683633.1 | 1148 | AACCAUGUAACAUGCAAGA | 1910-1928 |
| AD-887180 | A-1683634.1 | 849 | CUUGCAUGUUACAUGGUUA | A-1683635.1 | 1149 | UAACCAUGUAACAUGCAAG | 1911-1929 |
| AD-887181 | A-1683636.1 | 850 | UUGCAUGUUACAUGGUUAC | A-1683637.1 | 1150 | GUAACCAUGUAACAUGCAA | 1912-1930 |
| AD-887182 | A-1683638.1 | 851 | UGCAUGUUACAUGGUUACC | A-1683639.1 | 1151 | GGUAACCAUGUAACAUGCA | 1913-1931 |
| AD-887183 | A-1683640.1 | 852 | GCAUGUUACAUGGUUACCA | A-1683641.1 | 1152 | UGGUAACCAUGUAACAUGC | 1914-1932 |
| AD-887184 | A-1683642.1 | 853 | AUGUUACAUGGUUACCACA | A-1683643.1 | 1153 | UGUGGUAACCAUGUAACAU | 1916-1934 |
| AD-887185 | A-1683644.1 | 854 | UGUUACAUGGUUACCACAA | A-1683645.1 | 1154 | UUGUGGUAACCAUGUAACA | 1917-1935 |
| AD-887186 | A-1683646.1 | 855 | UGGUUACCACAAGCCACAA | A-1683647.1 | 1155 | UUGUGGCUUGUGGUAACCA | 1924-1942 |
| AD-887187 | A-1683648.1 | 856 | GGUUACCACAAGCCACAAU | A-1683649.1 | 1156 | AUUGUGGCUUGUGGUAACC | 1925-1943 |
| AD-887188 | A-1683650.1 | 857 | GUUACCACAAGCCACAAUA | A-1683651.1 | 1157 | UAUUGUGGCUUGUGGUAAC | 1926-1944 |
| AD-887189 | A-1683652.1 | 858 | AAAAGCAUAACUUCUAAAG | A-1683653.1 | 1158 | CUUUAGAAGUUAUGCUUUU | 1945-1963 |
| AD-887190 | A-1683654.1 | 859 | AAAGCAUAACUUCUAAAGG | A-1683655.1 | 1159 | CCUUUAGAAGUUAUGCUUU | 1946-1964 |
| AD-887191 | A-1683656.1 | 860 | AAGCAUAACUUCUAAAGGA | A-1683657.1 | 1160 | UCCUUUAGAAGUUAUGCUU | 1947-1965 |
| AD-887192 | A-1683658.1 | 861 | AGCAUAACUUCUAAAGGAA | A-1683659.1 | 1161 | UUCCUUUAGAAGUUAUGCU | 1948-1966 |
| AD-887193 | A-1683660.1 | 862 | GCAUAACUUCUAAAGGAAG | A-1683661.1 | 1162 | CUUCCUUUAGAAGUUAUGC | 1949-1967 |
| AD-887194 | A-1683662.1 | 863 | CAUAACUUCUAAAGGAAGC | A-1683663.1 | 1163 | GCUUCCUUUAGAAGUUAUG | 1950-1968 |
| AD-887195 | A-1683664.1 | 864 | AUAACUUCUAAAGGAAGCA | A-1683665.1 | 1164 | UGCUUCCUUUAGAAGUUAU | 1951-1969 |
| AD-887196 | A-1683666.1 | 865 | ACUUCUAAAGGAAGCAGAA | A-1683667.1 | 1165 | UUCUGCUUCCUUUAGAAGU | 1954-1972 |
| AD-887197 | A-1683668.1 | 866 | UUCUAAAGGAAGCAGAAUA | A-1683669.1 | 1166 | UAUUCUGCUUCCUUUAGAA | 1956-1974 |
| AD-887198 | A-1683670.1 | 867 | UCUAAAGGAAGCAGAAUAG | A-1683671.1 | 1167 | CUAUUCUGCUUCCUUUAGA | 1957-1975 |
| AD-887199 | A-1683672.1 | 868 | CUAAAGGAAGCAGAAUAGC | A-1683673.1 | 1168 | GCUAUUCUGCUUCCUUUAG | 1958-1976 |
| AD-887200 | A-1683674.1 | 869 | AAAGGAAGCAGAAUAGCUC | A-1683675.1 | 1169 | GAGCUAUUCUGCUUCCUUU | 1960-1978 |
| AD-887201 | A-1683676.1 | 870 | AUAAGUAAGAUGCAUUUAC | A-1683677.1 | 1170 | GUAAAUGCAUCUUACUUAU | 1997-2015 |
| AD-887202 | A-1683678.1 | 871 | UAAGUAAGAUGCAUUUACU | A-1683679.1 | 1171 | AGUAAAUGCAUCUUACUUA | 1998-2016 |
| AD-887203 | A-1683680.1 | 872 | AAGUAAGAUGCAUUUACUA | A-1683681.1 | 1172 | UAGUAAAUGCAUCUUACUU | 1999-2017 |
| AD-887204 | A-1683682.1 | 873 | AGUAAGAUGCAUUUACUAC | A-1683683.1 | 1173 | GUAGUAAAUGCAUCUUACU | 2000-2018 |
| AD-887205 | A-1683684.1 | 874 | GUAAGAUGCAUUUACUACA | A-1683685.1 | 1174 | UGUAGUAAAUGCAUCUUAC | 2001-2019 |
| AD-887206 | A-1683686.1 | 875 | UAAGAUGCAUUUACUACAG | A-1683687.1 | 1175 | CUGUAGUAAAUGCAUCUUA | 2002-2020 |
| AD-887207 | A-1683688.1 | 876 | UUGGCUUCUAAUGCUUCAG | A-1683689.1 | 1176 | CUGAAGCAUUAGAAGCCAA | 2021-2039 |
| AD-887208 | A-1683690.1 | 877 | UGGCUUCUAAUGCUUCAGA | A-1683691.1 | 1177 | UCUGAAGCAUUAGAAGCCA | 2022-2040 |
| AD-887209 | A-1683692.1 | 878 | GGCUUCUAAUGCUUCAGAU | A-1683693.1 | 1178 | AUCUGAAGCAUUAGAAGCC | 2023-2041 |
| AD-887210 | A-1683694.1 | 879 | GCUUCUAAUGCUUCAGAUA | A-1683695.1 | 1179 | UAUCUGAAGCAUUAGAAGC | 2024-2042 |
| AD-887211 | A-1683696.1 | 880 | UCUAAUGCUUCAGAUAGAA | A-1683697.1 | 1180 | UUCUAUCUGAAGCAUUAGA | 2027-2045 |
| AD-887212 | A-1683698.1 | 881 | CUAAUGCUUCAGAUAGAAU | A-1683699.1 | 1181 | AUUCUAUCUGAAGCAUUAG | 2028-2046 |
| AD-887213 | A-1683700.1 | 882 | UAAUGCUUCAGAUAGAAUA | A-1683701.1 | 1182 | UAUUCUAUCUGAAGCAUUA | 2029-2047 |
| AD-887214 | A-1683702.1 | 883 | AAUGCUUCAGAUAGAAUAC | A-1683703.1 | 1183 | GUAUUCUAUCUGAAGCAUU | 2030-2048 |
| AD-887215 | A-1683704.1 | 884 | AUGCUUCAGAUAGAAUACA | A-1683705.1 | 1184 | UGUAUUCUAUCUGAAGCAU | 2031-2049 |
| AD-887216 | A-1683706.1 | 885 | UGCUUCAGAUAGAAUACAG | A-1683707.1 | 1185 | CUGUAUUCUAUCUGAAGCA | 2032-2050 |
| AD-887217 | A-1683708.1 | 886 | GCUUCAGAUAGAAUACAGU | A-1683709.1 | 1186 | ACUGUAUUCUAUCUGAAGC | 2033-2051 |
| AD-887218 | A-1683710.1 | 887 | CUUCAGAUAGAAUACAGUU | A-1683711.1 | 1187 | AACUGUAUUCUAUCUGAAG | 2034-2052 |
| AD-887219 | A-1683712.1 | 888 | UUCAGAUAGAAUACAGUUG | A-1683713.1 | 1188 | CAACUGUAUUCUAUCUGAA | 2035-2053 |
| AD-887220 | A-1683714.1 | 889 | UCAGAUAGAAUACAGUUGG | A-1683715.1 | 1189 | CCAACUGUAUUCUAUCUGA | 2036-2054 |
| AD-887221 | A-1683716.1 | 890 | CAGAUAGAAUACAGUUGGG | A-1683717.1 | 1190 | CCCAACUGUAUUCUAUCUG | 2037-2055 |
| AD-887222 | A-1683718.1 | 891 | CAUUGUGAAAUAAAAUUUU | A-1683719.1 | 1191 | AAAAUUUUAUUUCACAAUG | 2073-2091 |
| AD-887223 | A-1683720.1 | 892 | AUUGUGAAAUAAAAUUUUC | A-1683721.1 | 1192 | GAAAAUUUUAUUUCACAAU | 2074-2092 |
| AD-887224 | A-1683722.1 | 893 | UUGUGAAAUAAAAUUUUCU | A-1683723.1 | 1193 | AGAAAAUUUUAUUUCACAA | 2075-2093 |
| AD-887225 | A-1683724.1 | 894 | UGUGAAAUAAAAUUUUCUU | A-1683725.1 | 1194 | AAGAAAAUUUUAUUUCACA | 2076-2094 |
| AD-887226 | A-1683726.1 | 895 | GUGAAAUAAAAUUUUCUUA | A-1683727.1 | 1195 | UAAGAAAAUUUUAUUUCAC | 2077-2095 |
| AD-887227 | A-1683728.1 | 896 | UGAAAUAAAAUUUUCUUAC | A-1683729.1 | 1196 | GUAAGAAAAUUUUAUUUCA | 2078-2096 |
| AD-887228 | A-1683730.1 | 897 | GAAAUAAAAUUUUCUUACC | A-1683731.1 | 1197 | GGUAAGAAAAUUUUAUUUC | 2079-2097 |
| AD-887229 | A-1683732.1 | 898 | AAAUAAAAUUUUCUUACCC | A-1683733.1 | 1198 | GGGUAAGAAAAUUUUAUUU | 2080-2098 |
| AD-887230 | A-1683734.1 | 899 | AAUAAAAUUUUCUUACCCA | A-1683735.1 | 1199 | UGGGUAAGAAAAUUUUAUU | 2081-2099 |
| AD-887231 | A-1683736.1 | 900 | AUAAAAUUUUCUUACCCAA | A-1683737.1 | 1200 | UUGGGUAAGAAAAUUUUAU | 2082-2100 |

TABLE 3A

Exemplary Human MYOC siRNA Modified Single Strands and Duplex Sequences

| Duplex Name | Sense Sequence Name | SEQ ID NO: (Sense) | Sense Sequence (5′-3′) | Antisense Sequence Name | SEQ ID NO: (Antisense) | Antisense Sequence | mRNA target sequence | SEQ ID NO: |
|---|---|---|---|---|---|---|---|---|
| AD-954362.1 | A-1801568.1 | 1201 | csasgca(Chd) AfgCfAfGfa gcuuuccaaL9 6 | A-1801569.1 | 1336 | VPusUfsgga AfaGfCfucug CfuGfugcugs asg | CUCAGCACAGCAGAGCUUUCCAG | 3051 |
| AD-954363.1 | A-1801570.1 | 1202 | asgscac(Ahd) GfcAfGfAfg cuuuccagaL9 6 | A-1801571.1 | 1337 | VPusCfsugg AfaAfGfcucu GfcUfgugcus gsa | UCAGCACAGCAGAGCUUUCCAGA | 3052 |
| AD-954410.1 | A-1801664.1 | 1203 | asgsguu(Chd) UfuCfUfGfu gcacguugaL9 6 | A-1801665.1 | 1338 | VPusCfsaac GfuGfCfacag AfaGfaaccus csa | UGAGGUUCUUCUGUGCACGUUGC | 3053 |
| AD-954411.1 | A-1801666.1 | 1204 | gsgsuuc(Uhd)UfcUfGfUfg cacguugcaL9 6 | A-1801667.1 | 1339 | VPusGfscaa CfgUfGfcaca GfaAfgaaccs use | GAGGUUCUUCUGUGCACGUUGCU | 3054 |
| AD-954548.1 | A-1801939.1 | 1205 | gscscag(Uhd) CfcCfAfAfug aauccagaL96 | A-1801940.1 | 1340 | VPusCfsugg AfuUfCfauug GfgAfeugges csa | UGGCCAGUCCCAAUGAAUCCAGC | 3055 |
| AD-954684.1 | A-1802210.1 | 1206 | csasgcu(Ghd) GfaAfAfCfcc aaaccagaL96 | A-1577549.1 | 1341 | VPusCfsugg UfuUfGfggu uUfcCfagcug sgsu | ACCAGCUGGAAACCCAAACCAGA | 3056 |
| AD-954771.1 | A-1802382.1 | 1207 | uscscga(Ghd) AfeAfAfGfu caguucugaL9 6 | A-1802383.1 | 1342 | VPusCfsaga AfcUfGfacuu GfuCfucggas gsg | CCUCCGAGACAAGUCAGUUCUGG | 3057 |
| AD-954772.1 | A-1802384.1 | 1208 | cscsgag(Ahd) CfaAfGfUfca guucuggaL96 | A-1802385.1 | 1343 | VPusCfscag AfaCfUfgacu UfgUfcucggs asg | CUCCGAGACAAGUCAGUUCUGGA | 3058 |
| AD-954891.1 | A-1802621.1 | 1209 | asgsgcu(Chd) CfaGfAfGfaa guuucuaaL96 | A-1802622.1 | 1344 | VPusUfsaga AfaCfUfucuc UfgGfagccus gsg | CCAGGCUCCAGAGAAGUUUCUAC | 3059 |
| AD-954892.1 | A-1802623.1 | 1210 | gsgscuc(Chd) AfgAfGfAfa guuucuacaL9 6 | A-1802624.1 | 1345 | VPusGfsuag AfaAfCfuucu CfuGfgagccs usg | CAGGCUCCAGAGAAGUUUCUACG | 3060 |
| AD-954912.1 | A-1802663.1 | 1211 | gsusgga(Ahd )UfuUfGfGfa cacuuuggaL9 6 | A-1802664.1 | 1346 | VPusCfscaa AfgUfGfucca AfaUfuccacs gsu | ACGUGGAAUUUGGACACUUUGGC | 3061 |
| AD-954913.1 | A-1802665.1 | 1212 | usgsgaa(Uhd) UfuGfGfAfe acuuuggcaL9 6 | A-1802666.1 | 1347 | VPusGfscca AfaGfUfgucc AfaAfuuccas csg | CGUGGAAUUUGGACACUUUGGCC | 3062 |
| AD-954914.1 | A-1802667.1 | 1213 | gsgsaau(Uhd) UfgGfAfCfac uuuggccaL96 | A-1802668.1 | 1348 | VPusGfsgcc AfaAfGfuguc CfaAfauuccs asc | GUGGAAUUUGGACACUUUGGCCU | 3063 |
| AD-954915.1 | A-1802669.1 | 1214 | gsasauu(Uhd) GfgAfCfAfc uuuggccuaL9 6 | A-1802670.1 | 1349 | VPusAfsggc CfaAfAfgugu CfcAfaauucs csa | UGGAAUUUGGACACUUUGGCCUU | 3064 |
| AD-954921.1 | A-1802681.1 | 1215 | gsgsaca(Chd) UfuUfGfGfe cuuccaggaL9 6 | A-1802682.1 | 1350 | VPusCfscug GfaAfGfgcca AfaGfuguccs asa | UUGGACACUUUGGCCUUCCAGGA | 3065 |
| AD-954934.1 | A-1802707.1 | 1216 | uscscag(Ghd) AfaCfUfGfaa guccgagaL96 | A-1802708.1 | 1351 | VPusCfsucg GfaCfUfucag UfuCfeuggas asg | CUUCCAGGAACUGAAGUCCGAGC | 3066 |
| AD-954937.1 | A-1802713.1 | 1217 | gsusccg(Ahd) GfcUfAfAfc ugaaguucaL9 6 | A-1577559.1 | 1352 | VPusGfsaac UfuCfAfguua GfcUfcggacs usu | AAGUCCGAGCUAACUGAAGUUCC | 3067 |
| AD-954939.1 | A-1802715.1 | 1218 | ususccu(Ghd) CfuUfCfCfcg aauuuugaL96 | A-1577523.1 | 1353 | VPusCfsaaa AfuUfCfggga AfgCfaggaas csu | AGUUCCUGCUUCCCGAAUUUUGA | 3068 |
| AD-954944.1 | A-1802724.1 | 1219 | ascsuga(Ahd) GfuCfCfGfag cuaacugaL96 | A-1802725.1 | 1354 | VPusCfsagu UfaGfCfucgg AfcUfucagus use | GAACUGAAGUCCGAGCUAACUGA | 3069 |
| AD-954951.1 | A-1802738.1 | 1220 | csgsagc(Uhd) AfaCfUfGfaa guuccugaL96 | A-1802739.1 | 1355 | VPusCfsagg AfaCfUfucag UfuAfgcucgs gsa | UCCGAGCUAACUGAAGUUCCUGC | 3070 |
| AD-954958.1 | A-1802752.1 | 1221 | ascsuga(Ahd) GfuUfCfCfu gcuucccgaL9 6 | A-1802753.1 | 1356 | VPusCfsggg AfaGfCfagga AfcUfucagus usa | UAACUGAAGUUCCUGCUUCCCGA | 3071 |
| AD-954964.1 | A-1802764.1 | 1222 | gsusucc(Uhd) GfcUfUfCfcc gaauuuuaL96 | A-1802765.1 | 1357 | VPusAfsaaa UfuCfGfggaa GfcAfggaacs usu | AAGUUCCUGCUUCCCGAAUUUUG | 3072 |
| AD-954965.1 | A-1802766.1 | 1223 | uscscug(Chd) UfuCfCfCfga auuuugaaL96 | A-1802767.1 | 1358 | VPusUfscaa AfaUfUfcggg AfaGfcaggas asc | GUUCCUGCUUCCCGAAUUUUGAA | 3073 |
| AD-954966.1 | A-1802768.1 | 1224 | cscsugc(Uhd) UfcCfCfGfaa uuuugaaaL96 | A-1802769.1 | 1359 | VPusUfsuca AfaAfUfucgg GfaAfgcaggs asa | UUCCUGCUUCCCGAAUUUUGAAG | 3074 |
| AD-954967.1 | A-1802770.1 | 1225 | csusgcu(Uhd) CfcCfGfAfau uuugaagaL96 | A-1802771.1 | 1360 | VPusCfsuuc AfaAfAfuucg GfgAfagcags gsa | UCCUGCUUCCCGAAUUUUGAAGG | 3075 |
| AD-954968.1 | A-1802772.1 | 1226 | usgscuu(Chd) CfcGfAfAfu uuugaaggaL9 6 | A-1802773.1 | 1361 | VPusCfscuu CfaAfAfauuc GfgGfaageas gsg | CCUGCUUCCCGAAUUUUGAAGGA | 3076 |
| AD-954970.1 | A-1802776.1 | 1227 | csusucc(Chd) GfaAfUfUfu ugaaggagaL9 6 | A-1802777.1 | 1362 | VPusCfsucc UfuCfAfaaau UfcGfggaags csa | UGCUUCCCGAAUUUUGAAGGAGA | 3077 |
| AD-954992.1 | A-1802818.1 | 1228 | csgsgau(Ghd) UfgGfAfGfa acuaguuuaL9 6 | A-1577507.1 | 1363 | VPusAfsaac UfaGfUfucuc CfaCfauccgs gsu | ACCGGAUGUGGAGAACUAGUUUG | 3078 |
| AD-954993.1 | A-1802819.1 | 1229 | gsgsaug(Uhd )GfgAfGfAfa cuaguuugaL9 6 | A-1577525.1 | 1364 | VPusCfsaaaC fuAfGfuucuC fcAfcauccsgs g | CCGGAUGUGGAGAACUAGUUUGG | 3079 |
| AD-955030.1 | A-1802892.1 | 1230 | gsasugu(Ghd )GfaGfAfAfc uaguuuggaL9 6 | A-1802893.1 | 1365 | VPusCfscaa AfcUfAfguuc UfcCfacaucs csg | CGGAUGUGGAGAACUAGUUUGGG | 3080 |
| AD-955031.1 | A-1802894.1 | 1231 | asusgug(Ghd )AfgAfAfCfu aguuugggaL9 6 | A-1802895.1 | 1366 | VPusCfscca AfaCfUfaguu CfuCfcacaus csc | GGAUGUGGAGAACUAGUUUGGGU | 3081 |
| AD-955032.1 | A-1802896.1 | 1232 | usgsugg(Ahd )GfaAfCfUfa guuuggguaL9 6 | A-1802897.1 | 1367 | VPusAfsccc AfaAfCfuagu UfcUfccacas use | GAUGUGGAGAACUAGUUUGGGUA | 3082 |
| AD-955034.1 | A-1802900.1 | 1233 | usgsgag(Ahd )AfcUfAfGfu uuggguagaL9 6 | A-1802901.1 | 1368 | VPusCfsuac CfcAfAfacua GfuUfcuccas csa | UGUGGAGAACUAGUUUGGGUAGG | 3083 |
| AD-955035.1 | A-1802902.1 | 1234 | gsgsaga(Ahd) CfuAfGfUfu uggguaggaL9 6 | A-1802903.1 | 1369 | VPusCfscua CfcCfAfaacu AfgUfucuccs asc | GUGGAGAACUAGUUUGGGUAGGA | 3084 |
| AD-955037.1 | A-1802906.1 | 1235 | asgsaac(Uhd) AfgUfUfUfg gguaggagaL9 6 | A-1802907.1 | 1370 | VPusCfsucc UfaCfCfcaaa CfuAfguucus csc | GGAGAACUAGUUUGGGUAGGAGA | 3085 |
| AD-955074.1 | A-1802979.1 | 1236 | asascag(Chd) AfgAfAfAfc aauuacugaL9 6 | A-1802980.1 | 1371 | VPusCfsagu AfaUfUfguu uCfuGfeuguu scsu | AGAACAGCAGAAACAAUUACUGG | 3086 |
| AD-955075.1 | A-1802981.1 | 1237 | ascsagc(Ahd) GfaAfAfCfaa uuacuggaL96 | A-1802982.1 | 1372 | VPusCfscag UfaAfUfugu uUfcUfgcugu susc | GAACAGCAGAAACAAUUACUGGC | 3087 |
| AD-955082.1 | A-1802995.1 | 1238 | asascaa(Uhd) UfaCfUfGfgc aaguaugaL96 | A-1802996.1 | 1373 | VPusCfsaua CfuUfGfccag UfaAfuuguus use | GAAACAAUUACUGGCAAGUAUGG | 3088 |
| AD-955083.1 | A-1802997.1 | 1239 | ascsaau(Uhd) AfcUfGfGfca aguauggaL96 | A-1802998.1 | 1374 | VPusCfscau AfcUfUfgcca GfuAfauugus usu | AAACAAUUACUGGCAAGUAUGGU | 3089 |
| AD-955084.1 | A-1802999.1 | 1240 | csasauu(Ahd) CfuGfGfCfaa guaugguaL96 | A-1803000.1 | 1375 | VPusAfscca UfaCfUfugcc AfgUfaauugs usu | AACAAUUACUGGCAAGUAUGGUG | 3090 |
| AD-955085.1 | A-1803001.1 | 1241 | asasuua(Chd) UfgGfCfAfa guauggugaL9 6 | A-1803002.1 | 1376 | VPusCfsacc AfuAfCfuuge CfaGfuaauus gsu | ACAAUUACUGGCAAGUAUGGUGU | 3091 |
| AD-955086.1 | A-1803003.1 | 1242 | asusuac(Uhd) GfgCfAfAfg uaugguguaL9 6 | A-1803004.1 | 1377 | VPusAfscac CfaUfAfcuug CfcAfguaaus usg | CAAUUACUGGCAAGUAUGGUGUG | 3092 |
| AD-955087.1 | A-1803005.1 | 1243 | ususacu(Ghd) GfcAfAfGfu auggugugaL9 6 | A-1803006.1 | 1378 | VPusCfsacaC fcAfUfacuuG fcCfaguaasus u | AAUUACUGGCAAGUAUGGUGUGU | 3093 |
| AD-955097.1 | A-1803025.1 | 1244 | gsusaug(Ghd )UfgUfGfUfg gaugegagaL9 6 | A-1803026.1 | 1379 | VPusCfsucg CfaUfCfcaca CfaCfcauacs usu | AAGUAUGGUGUGUGGAUGCGAGA | 3094 |
| AD-955144.1 | A-1803119.1 | 1245 | gsasugu(Chd) CfgCfCfAfgg uuuuugaaL96 | A-1803120.1 | 1380 | VPusUfscaa AfaAfCfcugg CfgGfacaucs csg | CGGAUGUCCGCCAGGUUUUUGAG | 3095 |
| AD-955146.1 | A-1803122.1 | 1246 | cscsgcc(Ahd) GfgUfUfUfu ugaguaugaL9 6 | A-1577537.1 | 1381 | VPusCfsaua CfuCfAfaaaa CfcUfggcggs asc | GUCCGCCAGGUUUUUGAGUAUGA | 3096 |
| AD-955148.1 | A-1803124.1 | 1247 | gsasccu(Chd) AfuCfAfGfcc aguuuauaL96 | A-1577573.1 | 1382 | VPusAfsuaa AfcUfGfgcug AfuGfaggues asu | AUGACCUCAUCAGCCAGUUUAUG | 3097 |
| AD-955165.1 | A-1803152.1 | 1248 | ususuga(Ghd )UfaUfGfAfe cucaucagaL9 6 | A-1803153.1 | 1383 | VPusCfsuga UfgAfGfguca UfaCfucaaas asa | UUUUUGAGUAUGACCUCAUCAGC | 3098 |
| AD-955174.1 | A-1803170.1 | 1249 | ascscuc(Ahd) UfcAfGfCfca guuuaugaL96 | A-1803171.1 | 1384 | VPusCfsaua AfaCfUfggcu GfaUfgaggus csa | UGACCUCAUCAGCCAGUUUAUGC | 3099 |
| AD-955175.1 | A-1803172.1 | 1250 | cscsuca(Uhd) CfaGfCfCfag uuuaugeaL96 | A-1803173.1 | 1385 | VPusGfscau AfaAfCfugge UfgAfugaggs use | GACCUCAUCAGCCAGUUUAUGCA | 3100 |
| AD-955177.1 | A-1803176.1 | 1251 | uscsauc(Ahd) GfcCfAfGfu uuaugeagaL9 6 | A-1803177.1 | 1386 | VPusCfsugc AfuAfAfacug GfcUfgaugas gsg | CCUCAUCAGCCAGUUUAUGCAGG | 3101 |
| AD-955193.1 | A-1803208.1 | 1252 | gscsagg(Ghd) CfuAfCfCfcu ucuaaggaL96 | A-1803209.1 | 1387 | VPusCfscuu AfgAfAfggg uAfgCfccugc sasu | AUGCAGGGCUACCCUUCUAAGGU | 3102 |
| AD-955194.1 | A-1803210.1 | 1253 | csasggg(Chd) UfaCfCfCfuu cuaagguaL96 | A-1803211.1 | 1388 | VPusAfsccu UfaGfAfaggg UfaGfcccugs csa | UGCAGGGCUACCCUUCUAAGGUU | 3103 |
| AD-955196.1 | A-1803214.1 | 1254 | gsgsgcu(Ahd )CfcCfUfUfc uaagguucaL9 6 | A-1803215.1 | 1389 | VPusGfsaac CfuUfAfgaag GfgUfagcccs usg | CAGGGCUACCCUUCUAAGGUUCA | 3104 |
| AD-955199.1 | A-1803220.1 | 1255 | csusucu(Ahd) AfgGfUfUfc acauacugaL9 6 | A-1803221.1 | 1390 | VPusCfsagu AfuGfUfgaac CfuUfagaags gsg | CCCUUCUAAGGUUCACAUACUGC | 3105 |
| AD-955200.1 | A-1803222.1 | 1256 | ususcua(Ahd) GfgUfUfCfac auacugcaL96 | A-1803223.1 | 1391 | VPusGfscag UfaUfGfugaa CfcUfuagaas gsg | CCUUCUAAGGUUCACAUACUGCC | 3106 |
| AD-955255.1 | A-1803331.1 | 1257 | gsasguc(Chd) AfgAfAfCfu gucauaagaL9 6 | A-1577519.1 | 1392 | VPusCfsuua UfgAfCfaguu CfuGfgacucs asg | CUGAGUCCAGAACUGUCAUAAGA | 3107 |
| AD-955266.1 | A-1803352.1 | 1258 | gsuscca(Ghd) AfaCfUfGfuc auaagauaL96 | A-1803353.1 | 1393 | VPusAfsueu UfaUfGfacag UfuCfuggaes use | GAGUCCAGAACUGUCAUAAGAUA | 3108 |
| AD-955269.1 | A-1803358.1 | 1259 | csasgaa(Chd) UfgUfCfAfu aagauaugaL9 6 | A-1803359.1 | 1394 | VPusCfsaua UfeUfUfauga CfaGfuucugs gsa | UCCAGAACUGUCAUAAGAUAUGA | 3109 |
| AD-955270.1 | A-1803360.1 | 1260 | asgsaac(Uhd) GfuCfAfUfaa gauaugaaL96 | A-1803361.1 | 1395 | VPusUfscau AfuCfUfuaug AfcAfguucus gsg | CCAGAACUGUCAUAAGAUAUGAG | 3110 |
| AD-955271.1 | A-1803362.1 | 1261 | gsasacu(Ghd) UfcAfUfAfa gauaugagaL9 6 | A-1803363.1 | 1396 | VPusCfsuca UfaUfCfuuau GfaCfaguucs usg | CAGAACUGUCAUAAGAUAUGAGC | 3111 |
| AD-955272.1 | A-1803364.1 | 1262 | asascug(Uhd) CfaUfAfAfga uaugagcaL96 | A-1803365.1 | 1397 | VPusGfscuc AfuAfUfcuua UfgAfcaguus csu | AGAACUGUCAUAAGAUAUGAGCU | 3112 |
| AD-955281.1 | A-1803382.1 | 1263 | asasgau(Ahd) UfgAfGfCfu gaauaccgaL9 6 | A-1803383.1 | 1398 | VPusCfsggu AfuUfCfageu CfaUfaucuus asu | AUAAGAUAUGAGCUGAAUACCGA | 3113 |
| AD-955282.1 | A-1803384.1 | 1264 | asgsaua(Uhd) GfaGfCfUfga auaccgaaL96 | A-1803385.1 | 1399 | VPusUfsegg UfaUfUfeage UfcAfuaucus usa | UAAGAUAUGAGCUGAAUACCGAG | 3114 |
| AD-955283.1 | A-1803386.1 | 1265 | gsasuau(Ghd) AfgCfUfGfaa uaccgagaL96 | A-1803387.1 | 1400 | VPusCfsucg GfuAfUfucag CfuCfauaues usu | AAGAUAUGAGCUGAAUACCGAGA | 3115 |
| AD-955292.1 | A-1803404.1 | 1266 | usgsaau(Ahd) CfcGfAfGfac agugaagaL96 | A-1803405.1 | 1401 | VPusCfsuuc AfcUfGfucuc GfgUfauucas gsc | GCUGAAUACCGAGACAGUGAAGG | 3116 |
| AD-955293.1 | A-1803406.1 | 1267 | gsasaua(Chd) CfgAfGfAfca gugaaggaL96 | A-1803407.1 | 1402 | VPusCfscuu CfaCfUfgucu CfgGfuauucs asg | CUGAAUACCGAGACAGUGAAGGC | 3117 |
| AD-955308.1 | A-1803434.1 | 1268 | cscsacg(Ghd) AfcAfGfUfu cccguauuaL9 6 | A-1577539.1 | 1403 | VPusAfsaua CfgGfGfaacu GfuCfcguggs usa | UACCACGGACAGUUCCCGUAUUC | 3118 |
| AD-955309.1 | A-1803435.1 | 1269 | csascgg(Ahd) CfaGfUfUfcc cguauucaL96 | A-1577529.1 | 1404 | VPusGfsaau AfcGfGfgaac UfgUfccgugs gsu | ACCACGGACAGUUCCCGUAUUCU | 3119 |
| AD-955310.1 | A-1803436.1 | 1270 | ascsgga(Chd) AfgUfUfCfcc guauucuaL96 | A-1577521.1 | 1405 | VPusAfsgaa UfaCfGfggaa CfuGfuccgus gsg | CCACGGACAGUUCCCGUAUUCUU | 3120 |
| AD-955343.1 | A-1803501.1 | 1271 | ascscac(Ghd) GfaCfAfGfu ucccguauaL9 6 | A-1803502.1 | 1406 | VPusAfsuac GfgGfAfacug UfcCfguggus asg | CUACCACGGACAGUUCCCGUAUU | 3121 |
| AD-955344.1 | A-1803503.1 | 1272 | csgsgac(Ahd) GfuUfCfCfcg uauucuuaL96 | A-1803504.1 | 1407 | VPusAfsaga AfuAfCfggga AfcUfguccgs usg | CACGGACAGUUCCCGUAUUCUUG | 3122 |
| AD-955345.1 | A-1803505.1 | 1273 | gsgsaca(Ghd) UfuCfCfCfgu auucuugaL96 | A-1803506.1 | 1408 | VPusCfsaag AfaUfAfeggg AfaCfuguccs gsu | ACGGACAGUUCCCGUAUUCUUGG | 3123 |
| AD-955346.1 | A-1803507.1 | 1274 | gsascag(Uhd) UfcCfCfGfua uucuuggaL96 | A-1803508.1 | 1409 | VPusCfscaa GfaAfUfacgg GfaAfcugucs csg | CGGACAGUUCCCGUAUUCUUGGG | 3124 |
| AD-955385.1 | A-1803585.1 | 1275 | csasggc(Chd) UfcUfGfGfg ucauuuacaL9 6 | A-1803586.1 | 1410 | VPusGfsuaa AfuGfAfccca GfaGfgccugs csu | AGCAGGCCUCUGGGUCAUUUACA | 3125 |
| AD-955386.1 | A-1803587.1 | 1276 | asgsgcc(Uhd) CfuGfGfGfu cauuuacaaL9 6 | A-1803588.1 | 1411 | VPusUfsgua AfaUfGfaccc AfgAfggccus gsc | GCAGGCCUCUGGGUCAUUUACAG | 3126 |
| AD-955387.1 | A-1803589.1 | 1277 | gsgsccu(Chd) UfgGfGfUfc auuuacagaL9 6 | A-1803590.1 | 1412 | VPusCfsugu AfaAfUfgacc CfaGfaggccs usg | CAGGCCUCUGGGUCAUUUACAGC | 3127 |
| AD-955415.1 | A-1803645.1 | 1278 | asgsgcc(Ahd) AfaGfGfUfg ccauugucaL9 6 | A-1803646.1 | 1413 | VPusGfsaca AfuGfGfcacc UfuUfggccus csa | UGAGGCCAAAGGUGCCAUUGUCC | 3128 |
| AD-955427.1 | A-1803669.1 | 1279 | cscsauu(Ghd) UfcCfUfCfuc caaacugaL96 | A-1803670.1 | 1414 | VPusCfsagu UfuGfGfagag GfaCfaauggs csa | UGCCAUUGUCCUCUCCAAACUGA | 3129 |
| AD-955504.1 | A-1803823.1 | 1280 | gsuscgc(Chd) AfaUfGfCfcu ucaucauaL96 | A-1803824.1 | 1415 | VPusAfsuga UfgAfAfggca UfuGfgcgacs usg | CAGUCGCCAAUGCCUUCAUCAUC | 3130 |
| AD-955570.1 | A-1803953.1 | 1281 | usasccg(Uhd) CfaAfCfUfuu gcuuaugaL96 | A-1803954.1 | 1416 | VPusCfsaua AfgCfAfaagu UfgAfegguas gsc | GCUACCGUCAACUUUGCUUAUGA | 3131 |
| AD-955571.1 | A-1803955.1 | 1282 | ascscgu(Chd) AfaCfUfUfu gcuuaugaaL9 6 | A-1803956.1 | 1417 | VPusUfscau AfaGfCfaaag UfuGfacggus asg | CUACCGUCAACUUUGCUUAUGAC | 3132 |
| AD-955572.1 | A-1803957.1 | 1283 | cscsguc(Ahd) AfcUfUfUfg cuuaugacaL9 6 | A-1803958.1 | 1418 | VPusGfsuca UfaAfGfcaaa GfuUfgacggs usa | UACCGUCAACUUUGCUUAUGACA | 3133 |
| AD-955586.1 | A-1803985.1 | 1284 | usasuga(Chd) AfcAfGfGfca cagguauaL96 | A-1803986.1 | 1419 | VPusAfsuac CfuGfUfgccu GfuGfucauas asg | CUUAUGACACAGGCACAGGUAUC | 3134 |
| AD-955612.1 | A-1804037.1 | 1285 | ascsccu(Ghd) AfcCfAfUfcc cauucaaaL96 | A-1804038.1 | 1420 | VPusUfsuga AfuGfGfgau gGfuCfagggu scsu | AGACCCUGACCAUCCCAUUCAAG | 3135 |
| AD-955615.1 | A-1804041.1 | 1286 | csasucc(Chd) AfuUfCfAfa gaaccgcuaL9 6 | A-1577531.1 | 1421 | VPusAfsgeg GfuUfCfuuga AfuGfggaugs gsu | ACCAUCCCAUUCAAGAACCGCUA | 3136 |
| AD-955617.1 | A-1804043.1 | 1287 | cscscug(Ahd) CfcAfUfCfcc auucaagaL96 | A-1804044.1 | 1422 | VPusCfsuug AfaUfGfggau GfgUfcagggs use | GACCCUGACCAUCCCAUUCAAGA | 3137 |
| AD-955620.1 | A-1804049.1 | 1288 | ascscau(Chd) CfcAfUfUfca agaaccgaL96 | A-1804050.1 | 1423 | VPusCfsggu UfcUfUfgaau GfgGfauggus csa | UGACCAUCCCAUUCAAGAACCGC | 3138 |
| AD-955621.1 | A-1804051.1 | 1289 | cscsauc(Chd) CfaUfUfCfaa gaaccgcaL96 | A-1804052.1 | 1424 | VPusGfsegg UfuCfUfugaa UfgGfgauggs use | GACCAUCCCAUUCAAGAACCGCU | 3139 |
| AD-955641.1 | A-1804091.1 | 1290 | usasagu(Ahd) CfaGfCfAfgc augauugaL96 | A-1804092.1 | 1425 | VPusCfsaau CfaUfGfcugc UfgUfacuuas usa | UAUAAGUACAGCAGCAUGAUUGA | 3140 |
| AD-955642.1 | A-1804093.1 | 1291 | asasgua(Chd) AfgCfAfGfca ugauugaaL96 | A-1804094.1 | 1426 | VPusUfscaa UfcAfUfgcug CfuGfuacuus asu | AUAAGUACAGCAGCAUGAUUGAC | 3141 |
| AD-955644.1 | A-1804097.1 | 1292 | gsusaca(Ghd) CfaGfCfAfug auugacuaL96 | A-1804098.1 | 1427 | VPusAfsguc AfaUfCfauge UfgCfuguacs usu | AAGUACAGCAGCAUGAUUGACUA | 3142 |
| AD-955664.1 | A-1804137.1 | 1293 | uscsuuu(Ghd )CfcUfGfGfg acaacuugaL9 6 | A-1804138.1 | 1428 | VPusCfsaag UfuGfUfccca GfgCfaaagas gsc | GCUCUUUGCCUGGGACAACUUGA | 3143 |
| AD-955668.1 | A-1804144.1 | 1294 | csusuga(Ahd) CfaUfGfGfuc acuuaugaL96 | A-1577509.1 | 1429 | VPusCfsaua AfgUfGfacca UfgUfucaags usu | AACUUGAACAUGGUCACUUAUGA | 3144 |
| AD-955669.1 | A-1804145.1 | 1295 | ususgaa(Chd) AfuGfGfUfc acuuaugaaL9 6 | A-1577563.1 | 1430 | VPusUfscau AfaGfUfgacc AfuGfuucaas gsu | ACUUGAACAUGGUCACUUAUGAC | 3145 |
| AD-955682.1 | A-1804170.1 | 1296 | usgsaac(Ahd) UfgGfUfCfac uuaugacaL96 | A-1804171.1 | 1431 | VPusGfsuca UfaAfGfugac CfaUfguucas asg | CUUGAACAUGGUCACUUAUGACA | 3146 |
| AD-955702.1 | A-1804210.1 | 1297 | asuscaa(Ghd) CfuCfUfCfca agaugugaL96 | A-1804211.1 | 1432 | VPusCfsaca UfcUfUfggag AfgCfuugaus gsu | ACAUCAAGCUCUCCAAGAUGUGA | 3147 |
| AD-955703.1 | A-1804212.1 | 1298 | uscsaag(Chd) UfcUfCfCfaa gaugugaaL96 | A-1804213.1 | 1433 | VPusUfscac AfuCfUfugga GfaGfcuugas usg | CAUCAAGCUCUCCAAGAUGUGAA | 3148 |
| AD-955851.1 | A-1804508.1 | 1299 | ususeag(Ghd) AfaUfUfGfu agueugagaL9 6 | A-1804509.1 | 1434 | VPusCfsuca GfaCfUfacaa UfuCfcugaas usa | UAUUCAGGAAUUGUAGUCUGAGG | 3149 |
| AD-955886.1 | A-1804578.1 | 1300 | usasucu(Uhd) CfuGfUfCfag cauuuauaL96 | A-1804579.1 | 1435 | VPusAfsuaa AfuGfCfugac AfgAfagauas asa | UUUAUCUUCUGUCAGCAUUUAUG | 3150 |
| AD-955887.1 | A-1804580.1 | 1301 | asuscuu(Chd) UfgUfCfAfg cauuuaugaL9 6 | A-1804581.1 | 1436 | VPusCfsaua AfaUfGfeuga CfaGfaagaus asa | UUAUCUUCUGUCAGCAUUUAUGG | 3151 |
| AD-955888.1 | A-1804582.1 | 1302 | uscsuuc(Uhd) GfuCfAfGfca uuuauggaL96 | A-1804583.1 | 1437 | VPusCfscau AfaAfUfgcug AfcAfgaagas usa | UAUCUUCUGUCAGCAUUUAUGGG | 3152 |
| AD-955889.1 | A-1804584.1 | 1303 | csusucu(Ghd) UfcAfGfCfau uuaugggaL96 | A-1804585.1 | 1438 | VPusCfscca UfaAfAfugcu GfaCfagaags asu | AUCUUCUGUCAGCAUUUAUGGGA | 3153 |
| AD-955891.1 | A-1804588.1 | 1304 | usesugu(Chd) AfgCfAfUfu uaugggauaL9 6 | A-1804589.1 | 1439 | VPusAfsucc CfaUfAfaaug CfuGfacagas asg | CUUCUGUCAGCAUUUAUGGGAUG | 3154 |
| AD-955892.1 | A-1804590.1 | 1305 | csusguc(Ahd) GfcAfUfUfu augggaugaL9 6 | A-1804591.1 | 1440 | VPusCfsauc CfcAfUfaaau GfcUfgacags asa | UUCUGUCAGCAUUUAUGGGAUGU | 3155 |
| AD-955899.1 | A-1804604.1 | 1306 | csasuuu(Ahd) UfgGfGfAfu guuuaaugaL9 6 | A-1804605.1 | 1441 | VPusCfsauu AfaAfCfaucc CfaUfaaaugs csu | AGCAUUUAUGGGAUGUUUAAUGA | 3156 |
| AD-955900.1 | A-1804606.1 | 1307 | asusuua(Uhd) GfgGfAfUfg uuuaaugaaL9 6 | A-1804607.1 | 1442 | VPusUfscau UfaAfAfcauc CfcAfuaaaus gsc | GCAUUUAUGGGAUGUUUAAUGAC | 3157 |
| AD-955901.1 | A-1804608.1 | 1308 | ususuau(Ghd )GfgAfUfGfu uuaaugacaL9 6 | A-1804609.1 | 1443 | VPusGfsuca UfuAfAfacau CfcCfauaaas usg | CAUUUAUGGGAUGUUUAAUGACA | 3158 |
| AD-955908.1 | A-1804622.1 | 1309 | gsasugu(Uhd )UfaAfUfGfa cauaguucaL9 6 | A-1804623.1 | 1444 | VPusGfsaac UfaUfGfucau UfaAfacaucs csc | GGGAUGUUUAAUGACAUAGUUCA | 3159 |
| AD-955917.1 | A-1804640.1 | 1310 | usgsaca(Uhd) AfgUfUfCfaa guuuucuaL96 | A-1804641.1 | 1445 | VPusAfsgaa AfaCfUfugaa CfuAfugueas usu | AAUGACAUAGUUCAAGUUUUCUU | 3160 |
| AD-955918.1 | A-1804642.1 | 1311 | gsascau(Ahd) GfuUfCfAfa guuuucuuaL9 6 | A-1804643.1 | 1446 | VPusAfsaga AfaAfCfuuga AfcUfaugucs asu | AUGACAUAGUUCAAGUUUUCUUG | 3161 |
| AD-955919.1 | A-1804644.1 | 1312 | ascsaua(Ghd) UfuCfAfAfg uuuucuugaL9 6 | A-1804645.1 | 1447 | VPusCfsaag AfaAfAfcuug AfaCfuaugus csa | UGACAUAGUUCAAGUUUUCUUGU | 3162 |
| AD-955920.1 | A-1804646.1 | 1313 | uscsuuc(Chd) UfgAfAfAfa ccauugcuaL9 6 | A-1577515.1 | 1448 | VPusAfsgca AfuGfGfuuu uCfaGfgaaga sasa | UUUCUUCCUGAAAACCAUUGCUC | 3163 |
| AD-955921.1 | A-1804647.1 | 1314 | csasuag(Uhd) UfcAfAfGfu uuucuuguaL9 6 | A-1804648.1 | 1449 | VPusAfscaa GfaAfAfacuu GfaAfcuaugs use | GACAUAGUUCAAGUUUUCUUGUG | 3164 |
| AD-955922.1 | A-1804649.1 | 1315 | asusagu(Uhd) CfaAfGfUfu uucuugugaL9 6 | A-1804650.1 | 1450 | VPusCfsaca AfgAfAfaacu UfgAfacuaus gsu | ACAUAGUUCAAGUUUUCUUGUGA | 3165 |
| AD-955923.1 | A-1804651.1 | 1316 | usasguu(Chd) AfaGfUfUfu ucuugugaaL9 6 | A-1804652.1 | 1451 | VPusUfscac AfaGfAfaaac UfuGfaacuas usg | CAUAGUUCAAGUUUUCUUGUGAU | 3166 |
| AD-955924.1 | A-1804653.1 | 1317 | asgsuuc(Ahd) AfgUfUfUfu cuugugauaL9 6 | A-1804654.1 | 1452 | VPusAfsuca CfaAfGfaaaa CfuUfgaacus asu | AUAGUUCAAGUUUUCUUGUGAUU | 3167 |
| AD-955927.1 | A-1804659.1 | 1318 | uscsaag(Uhd) UfuUfCfUfu gugauuugaL9 6 | A-1804660.1 | 1453 | VPusCfsaaa UfcAfCfaaga AfaAfcuugas asc | GUUCAAGUUUUCUUGUGAUUUGG | 3168 |
| AD-955962.1 | A-1804729.1 | 1319 | gsasaaa(Chd) CfaUfUfGfcu cuugcauaL96 | A-1804730.1 | 1454 | VPusAfsugc AfaGfAfgcaa UfgGfuuuucs asg | CUGAAAACCAUUGCUCUUGCAUG | 3169 |
| AD-955963.1 | A-1804731.1 | 1320 | asasaac(Chd) AfuUfGfCfu cuugcaugaL9 6 | A-1804732.1 | 1455 | VPusCfsaug CfaAfGfagea AfuGfguuuus csa | UGAAAACCAUUGCUCUUGCAUGU | 3170 |
| AD-955969.1 | A-1804743.1 | 1321 | asusugc(Uhd) CfuUfGfCfau guuacauaL96 | A-1804744.1 | 1456 | VPusAfsugu AfaCfAfugca AfgAfgcaaus gsg | CCAUUGCUCUUGCAUGUUACAUG | 3171 |
| AD-955970.1 | A-1804745.1 | 1322 | ususgcu(Chd) UfuGfCfAfu guuacaugaL9 6 | A-1804746.1 | 1457 | VPusCfsaug UfaAfCfauge AfaGfagcaas usg | CAUUGCUCUUGCAUGUUACAUGG | 3172 |
| AD-955971.1 | A-1804747.1 | 1323 | csusugc(Ahd) UfgUfUfAfc augguuacaL9 6 | A-1577565.1 | 1458 | VPusGfsuaa CfcAfUfguaa CfaUfgcaags asg | CUCUUGCAUGUUACAUGGUUACC | 3173 |
| AD-955979.1 | A-1804757.1 | 1324 | csuscuu(Ghd) CfaUfGfUfua caugguuaL96 | A-1804758.1 | 1459 | VPusAfsacc AfuGfUfaaca UfgCfaagags csa | UGCUCUUGCAUGUUACAUGGUUA | 3174 |
| AD-955980.1 | A-1804759.1 | 1325 | usesuug(Chd) AfuGfUfUfa caugguuaaL9 6 | A-1804760.1 | 1460 | VPusUfsaac CfaUfGfuaac AfuGfcaagas gsc | GCUCUUGCAUGUUACAUGGUUAC | 3175 |
| AD-956010.1 | A-1804819.1 | 1326 | asasaag(Chd) AfuAfAfCfu ucuaaaggaL9 6 | A-1804820.1 | 1461 | VPusCfscuu UfaGfAfaguu AfuGfcuuuus usa | UAAAAAGCAUAACUUCUAAAGGA | 3176 |
| AD-956011.1 | A-1804821.1 | 1327 | asasage(Ahd) UfaAfCfUfuc uaaaggaaL96 | A-1804822.1 | 1462 | VPusUfsccu UfuAfGfaagu UfaUfgcuuus usu | AAAAAGCAUAACUUCUAAAGGAA | 3177 |
| AD-956021.1 | A-1804841.1 | 1328 | uscsuaa(Ahd) GfgAfAfGfe agaauagcaL9 6 | A-1804842.1 | 1463 | VPusGfscua UfuCfUfgcuu CfcUfuuagas asg | CUUCUAAAGGAAGCAGAAUAGCU | 3178 |
| AD-956022.1 | A-1804843.1 | 1329 | csusaaa(Ghd) GfaAfGfCfag aauagcuaL96 | A-1804844.1 | 1464 | VPusAfsgcu AfuUfCfugcu UfcCfuuuags asa | UUCUAAAGGAAGCAGAAUAGCUC | 3179 |
| AD-956063.1 | A-1804925.1 | 1330 | asasgua(Ahd) GfaUfGfCfau uuacuacaL96 | A-1804926.1 | 1465 | VPusGfsuag UfaAfAfugca UfcUfuacuus asu | AUAAGUAAGAUGCAUUUACUACA | 3180 |
| AD-956079.1 | A-1804955.1 | 1331 | ususeag(Ahd) UfaGfAfAfu acaguuggaL9 6 | A-1577555.1 | 1466 | VPusCfscaaC fuGfUfauucU faUfcugaasgs c | GCUUCAGAUAGAAUACAGUUGGG | 3181 |
| AD-956087.1 | A-1804970.1 | 1332 | gsusugg(Chd )UfuCfUfAfa ugcuucagaL9 6 | A-1804971.1 | 1467 | VPusCfsuga AfgCfAfuuag AfaGfccaacs usg | CAGUUGGCUUCUAAUGCUUCAGA | 3182 |
| AD-956092.1 | A-1804980.1 | 1333 | uscsuaa(Uhd) GfcUfUfCfag auagaauaL96 | A-1804981.1 | 1468 | VPusAfsuuc UfaUfCfugaa GfeAfuuagas asg | CUUCUAAUGCUUCAGAUAGAAUA | 3183 |
| AD-956096.1 | A-1804988.1 | 1334 | asusgeu(Uhd) CfaGfAfUfag aauacagaL96 | A-1804989.1 | 1469 | VPusCfsugu AfuUfCfuaue UfgAfageaus usa | UAAUGCUUCAGAUAGAAUACAGU | 3184 |
| AD-956099.1 | A-1804994.1 | 1335 | csusuca(Ghd) AfuAfGfAfa uacaguugaL9 6 | A-1804995.1 | 1470 | VPusCfsaac UfgUfAfuuc uAfuCfugaag scsa | UGCUUCAGAUAGAAUACAGUUGG | 3185 |

TABLE 3B

Exemplary Human MYOC siRNA Unmodified Single Strands and Duplex Sequences

| Duplex Name | Sense Oligo Name | SEQ ID NO: (Sense) | Sense Sequence | Range | Antisense Oligo Name | SEQ ID NO: (Antisense) | Antisense Sequence | mRNA Target Range |
|---|---|---|---|---|---|---|---|---|
| AD-954362.1 | A-1801568.1 | 1471 | CAGCACAGCAGAGCUUUCCAA | 33-53 | A-1801569.1 | 1606 | UUGGAAAGCUCUGCUGUGCUGAG | 31-53 |
| AD-954363.1 | A-1801570.1 | 1472 | AGCACAGCAGAGCUUUCCAGA | 34-54 | A-1801571.1 | 1607 | UCUGGAAAGCUCUGCUGUGCUGA | 32-54 |
| AD-954410.1 | A-1801664.1 | 1473 | AGGUUCUUCUGUGCACGUUGA | 81-101 | A-1801665.1 | 1608 | UCAACGUGCACAGAAGAACCUCA | 79-101 |
| AD-954411.1 | A-1801666.1 | 1474 | GGUUCUUCUGUGCACGUUGCA | 82-102 | A-1801667.1 | 1609 | UGCAACGUGCACAGAAGAACCUC | 80-102 |
| AD-954548.1 | A-1801939.1 | 1475 | GCCAGUCCCAAUGAAUCCAGA | 237-257 | A-1801940.1 | 1610 | UCUGGAUUCAUUGGGACUGGCCA | 235-257 |
| AD-954684.1 | A-1802210.1 | 1476 | CAGCUGGAAACCCAAACCAGA | 465-485 | A-1577549.1 | 1611 | UCUGGUUUGGGUUUCCAGCUGGU | 463-485 |
| AD-954771.1 | A-1802382.1 | 1477 | UCCGAGACAAGUCAGUUCUGA | 514-534 | A-1802383.1 | 1612 | UCAGAACUGACUUGUCUCGGAGG | 512-534 |
| AD-954772.1 | A-1802384.1 | 1478 | CCGAGACAAGUCAGUUCUGGA | 515-535 | A-1802385.1 | 1613 | UCCAGAACUGACUUGUCUCGGAG | 513-535 |
| AD-954891.1 | A-1802621.1 | 1479 | AGGCUCCAGAGAAGUUUCUAA | 668-688 | A-1802622.1 | 1614 | UUAGAAACUUCUCUGGAGCCUGG | 666-688 |
| AD-954892.1 | A-1802623.1 | 1480 | GGCUCCAGAGAAGUUUCUACA | 669-689 | A-1802624.1 | 1615 | UGUAGAAACUUCUCUGGAGCCUG | 667-689 |
| AD-954912.1 | A-1802663.1 | 1481 | GUGGAAUUUGGACACUUUGGA | 689-709 | A-1802664.1 | 1616 | UCCAAAGUGUCCAAAUUCCACGU | 687-709 |
| AD-954913.1 | A-1802665.1 | 1482 | UGGAAUUUGGACACUUUGGCA | 690-710 | A-1802666.1 | 1617 | UGCCAAAGUGUCCAAAUUCCACG | 688-710 |
| AD-954914.1 | A-1802667.1 | 1483 | GGAAUUUGGACACUUUGGCCA | 691-711 | A-1802668.1 | 1618 | UGGCCAAAGUGUCCAAAUUCCAC | 689-711 |
| AD-954915.1 | A-1802669.1 | 1484 | GAAUUUGGACACUUUGGCCUA | 692-712 | A-1802670.1 | 1619 | UAGGCCAAAGUGUCCAAAUUCCA | 690-712 |
| AD-954921.1 | A-1802681.1 | 1485 | GGACACUUUGGCCUUCCAGGA | 698-718 | A-1802682.1 | 1620 | UCCUGGAAGGCCAAAGUGUCCAA | 696-718 |
| AD-954934.1 | A-1802707.1 | 1486 | UCCAGGAACUGAAGUCCGAGA | 712-732 | A-1802708.1 | 1621 | UCUCGGACUUCAGUUCCUGGAAG | 710-732 |
| AD-954937.1 | A-1802713.1 | 1487 | GUCCGAGCUAACUGAAGUUCA | 725-745 | A-1577559.1 | 1622 | UGAACUUCAGUUAGCUCGGACUU | 723-745 |
| AD-954939.1 | A-1802715.1 | 1488 | UUCCUGCUUCCCGAAUUUUGA | 742-762 | A-1577523.1 | 1623 | UCAAAAUUCGGGAAGCAGGAACU | 740-762 |
| AD-954944.1 | A-1802724.1 | 1489 | ACUGAAGUCCGAGCUAACUGA | 719-739 | A-1802725.1 | 1624 | UCAGUUAGCUCGGACUUCAGUUC | 717-739 |
| AD-954951.1 | A-1802738.1 | 1490 | CGAGCUAACUGAAGUUCCUGA | 728-748 | A-1802739.1 | 1625 | UCAGGAACUUCAGUUAGCUCGGA | 726-748 |
| AD-954958.1 | A-1802752.1 | 1491 | ACUGAAGUUCCUGCUUCCCGA | 735-755 | A-1802753.1 | 1626 | UCGGGAAGCAGGAACUUCAGUUA | 733-755 |
| AD-954964.1 | A-1802764.1 | 1492 | GUUCCUGCUUCCCGAAUUUUA | 741-761 | A-1802765.1 | 1627 | UAAAAUUCGGGAAGCAGGAACUU | 739-761 |
| AD-954965.1 | A-1802766.1 | 1493 | UCCUGCUUCCCGAAUUUUGAA | 743-763 | A-1802767.1 | 1628 | UUCAAAAUUCGGGAAGCAGGAAC | 741-763 |
| AD-954966.1 | A-1802768.1 | 1494 | CCUGCUUCCCGAAUUUUGAAA | 744-764 | A-1802769.1 | 1629 | UUUCAAAAUUCGGGAAGCAGGAA | 742-764 |
| AD-954967.1 | A-1802770.1 | 1495 | CUGCUUCCCGAAUUUUGAAGA | 745-765 | A-1802771.1 | 1630 | UCUUCAAAAUUCGGGAAGCAGGA | 743-765 |
| AD-954968.1 | A-1802772.1 | 1496 | UGCUUCCCGAAUUUUGAAGGA | 746-766 | A-1802773.1 | 1631 | UCCUUCAAAAUUCGGGAAGCAGG | 744-766 |
| AD-954970.1 | A-1802776.1 | 1497 | CUUCCCGAAUUUUGAAGGAGA | 748-768 | A-1802777.1 | 1632 | UCUCCUUCAAAAUUCGGGAAGCA | 746-768 |
| AD-954992.1 | A-1802818.1 | 1498 | CGGAUGUGGAGAACUAGUUUA | 806-826 | A-1577507.1 | 1633 | UAAACUAGUUCUCCACAUCCGGU | 804-826 |
| AD-954993.1 | A-1802819.1 | 1499 | GGAUGUGGAGAACUAGUUUGA | 807-827 | A-1577525.1 | 1634 | UCAAACUAGUUCUCCACAUCCGG | 805-827 |
| AD-955030.1 | A-1802892.1 | 1500 | GAUGUGGAGAACUAGUUUGGA | 808-828 | A-1802893.1 | 1635 | UCCAAACUAGUUCUCCACAUCCG | 806-828 |
| AD-955031.1 | A-1802894.1 | 1501 | AUGUGGAGAACUAGUUUGGGA | 809-829 | A-1802895.1 | 1636 | UCCCAAACUAGUUCUCCACAUCC | 807-829 |
| AD-955032.1 | A-1802896.1 | 1502 | UGUGGAGAACUAGUUUGGGUA | 810-830 | A-1802897.1 | 1637 | UACCCAAACUAGUUCUCCACAUC | 808-830 |
| AD-955034.1 | A-1802900.1 | 1503 | UGGAGAACUAGUUUGGGUAGA | 812-832 | A-1802901.1 | 1638 | UCUACCCAAACUAGUUCUCCACA | 810-832 |
| AD-955035.1 | A-1802902.1 | 1504 | GGAGAACUAGUUUGGGUAGGA | 813-833 | A-1802903.1 | 1639 | UCCUACCCAAACUAGUUCUCCAC | 811-833 |
| AD-955037.1 | A-1802906.1 | 1505 | AGAACUAGUUUGGGUAGGAGA | 815-835 | A-1802907.1 | 1640 | UCUCCUACCCAAACUAGUUCUCC | 813-835 |
| AD-955074.1 | A-1802979.1 | 1506 | AACAGCAGAAACAAUUACUGA | 851-871 | A-1802980.1 | 1641 | UCAGUAAUUGUUUCUGCUGUUCU | 849-871 |
| AD-955075.1 | A-1802981.1 | 1507 | ACAGCAGAAACAAUUACUGGA | 852-872 | A-1802982.1 | 1642 | UCCAGUAAUUGUUUCUGCUGUUC | 850-872 |
| AD-955082.1 | A-1802995.1 | 1508 | AACAAUUACUGGCAAGUAUGA | 860-880 | A-1802996.1 | 1643 | UCAUACUUGCCAGUAAUUGUUUC | 858-880 |
| AD-955083.1 | A-1802997.1 | 1509 | ACAAUUACUGGCAAGUAUGGA | 861-881 | A-1802998.1 | 1644 | UCCAUACUUGCCAGUAAUUGUUU | 859-881 |
| AD-955084.1 | A-1802999.1 | 1510 | CAAUUACUGGCAAGUAUGGUA | 862-882 | A-1803000.1 | 1645 | UACCAUACUUGCCAGUAAUUGUU | 860-882 |
| AD-955085.1 | A-1803001.1 | 1511 | AAUUACUGGCAAGUAUGGUGA | 863-883 | A-1803002.1 | 1646 | UCACCAUACUUGCCAGUAAUUGU | 861-883 |
| AD-955086.1 | A-1803003.1 | 1512 | AUUACUGGCAAGUAUGGUGUA | 864-884 | A-1803004.1 | 1647 | UACACCAUACUUGCCAGUAAUUG | 862-884 |
| AD-955087.1 | A-1803005.1 | 1513 | UUACUGGCAAGUAUGGUGUGA | 865-885 | A-1803006.1 | 1648 | UCACACCAUACUUGCCAGUAAUU | 863-885 |
| AD-955097.1 | A-1803025.1 | 1514 | GUAUGGUGUGUGGAUGCGAGA | 875-895 | A-1803026.1 | 1649 | UCUCGCAUCCACACACCAUACUU | 873-895 |
| AD-955144.1 | A-1803119.1 | 1515 | GAUGUCCGCCAGGUUUUUGAA | 957-977 | A-1803120.1 | 1650 | UUCAAAAACCUGGCGGACAUCCG | 955-977 |
| AD-955146.1 | A-1803122.1 | 1516 | CCGCCAGGUUUUUGAGUAUGA | 962-982 | A-1577537.1 | 1651 | UCAUACUCAAAAACCUGGCGGAC | 960-982 |
| AD-955148.1 | A-1803124.1 | 1517 | GACCUCAUCAGCCAGUUUAUA | 981-1001 | A-1577573.1 | 1652 | UAUAAACUGGCUGAUGAGGUCAU | 979-1001 |
| AD-955165.1 | A-1803152.1 | 1518 | UUUGAGUAUGACCUCAUCAGA | 972-992 | A-1803153.1 | 1653 | UCUGAUGAGGUCAUACUCAAAAA | 970-992 |
| AD-955174.1 | A-1803170.1 | 1519 | ACCUCAUCAGCCAGUUUAUGA | 982-1002 | A-1803171.1 | 1654 | UCAUAAACUGGCUGAUGAGGUCA | 980-1002 |
| AD-955175.1 | A-1803172.1 | 1520 | CCUCAUCAGCCAGUUUAUGCA | 983-1003 | A-1803173.1 | 1655 | UGCAUAAACUGGCUGAUGAGGUC | 981-1003 |
| AD-955177.1 | A-1803176.1 | 1521 | UCAUCAGCCAGUUUAUGCAGA | 985-1005 | A-1803177.1 | 1656 | UCUGCAUAAACUGGCUGAUGAGG | 983-1005 |
| AD-955193.1 | A-1803208.1 | 1522 | GCAGGGCUACCCUUCUAAGGA | 1001-1021 | A-1803209.1 | 1657 | UCCUUAGAAGGGUAGCCCUGCAU | 999-1021 |
| AD-955194.1 | A-1803210.1 | 1523 | CAGGGCUACCCUUCUAAGGUA | 1002-1022 | A-1803211.1 | 1658 | UACCUUAGAAGGGUAGCCCUGCA | 1000-1022 |
| AD-955196.1 | A-1803214.1 | 1524 | GGGCUACCCUUCUAAGGUUCA | 1004-1024 | A-1803215.1 | 1659 | UGAACCUUAGAAGGGUAGCCCUG | 1002-1024 |
| AD-955199.1 | A-1803220.1 | 1525 | CUUCUAAGGUUCACAUACUGA | 1012-1032 | A-1803221.1 | 1660 | UCAGUAUGUGAACCUUAGAAGGG | 1010-1032 |
| AD-955200.1 | A-1803222.1 | 1526 | UUCUAAGGUUCACAUACUGCA | 1013-1033 | A-1803223.1 | 1661 | UGCAGUAUGUGAACCUUAGAAGG | 1011-1033 |
| AD-955255.1 | A-1803331.1 | 1527 | GAGUCCAGAACUGUCAUAAGA | 1095-1115 | A-1577519.1 | 1662 | UCUUAUGACAGUUCUGGACUCAG | 1093-1115 |
| AD-955266.1 | A-1803352.1 | 1528 | GUCCAGAACUGUCAUAAGAUA | 1097-1117 | A-1803353.1 | 1663 | UAUCUUAUGACAGUUCUGGACUC | 1095-1117 |
| AD-955269.1 | A-1803358.1 | 1529 | CAGAACUGUCAUAAGAUAUGA | 1100-1120 | A-1803359.1 | 1664 | UCAUAUCUUAUGACAGUUCUGGA | 1098-1120 |
| AD-955270.1 | A-1803360.1 | 1530 | AGAACUGUCAUAAGAUAUGAA | 1101-1121 | A-1803361.1 | 1665 | UUCAUAUCUUAUGACAGUUCUGG | 1099-1121 |
| AD-955271.1 | A-1803362.1 | 1531 | GAACUGUCAUAAGAUAUGAGA | 1102-1122 | A-1803363.1 | 1666 | UCUCAUAUCUUAUGACAGUUCUG | 1100-1122 |
| AD-955272.1 | A-1803364.1 | 1532 | AACUGUCAUAAGAUAUGAGCA | 1103-1123 | A-1803365.1 | 1667 | UGCUCAUAUCUUAUGACAGUUCU | 1101-1123 |
| AD-955281.1 | A-1803382.1 | 1533 | AAGAUAUGAGCUGAAUACCGA | 1112-1132 | A-1803383.1 | 1668 | UCGGUAUUCAGCUCAUAUCUUAU | 1110-1132 |
| AD-955282.1 | A-1803384.1 | 1534 | AGAUAUGAGCUGAAUACCGAA | 1113-1133 | A-1803385.1 | 1669 | UUCGGUAUUCAGCUCAUAUCUUA | 1111-1133 |
| AD-955283.1 | A-1803386.1 | 1535 | GAUAUGAGCUGAAUACCGAGA | 1114-1134 | A-1803387.1 | 1670 | UCUCGGUAUUCAGCUCAUAUCUU | 1112-1134 |
| AD-955292.1 | A-1803404.1 | 1536 | UGAAUACCGAGACAGUGAAGA | 1123-1143 | A-1803405.1 | 1671 | UCUUCACUGUCUCGGUAUUCAGC | 1121-1143 |
| AD-955293.1 | A-1803406.1 | 1537 | GAAUACCGAGACAGUGAAGGA | 1124-1144 | A-1803407.1 | 1672 | UCCUUCACUGUCUCGGUAUUCAG | 1122-1144 |
| AD-955308.1 | A-1803434.1 | 1538 | CCACGGACAGUUCCCGUAUUA | 1172-1192 | A-1577539.1 | 1673 | UAAUACGGGAACUGUCCGUGGUA | 1170-1192 |
| AD-955309.1 | A-1803435.1 | 1539 | CACGGACAGUUCCCGUAUUCA | 1173-1193 | A-1577529.1 | 1674 | UGAAUACGGGAACUGUCCGUGGU | 1171-1193 |
| AD-955310.1 | A-1803436.1 | 1540 | ACGGACAGUUCCCGUAUUCUA | 1174-1194 | A-1577521.1 | 1675 | UAGAAUACGGGAACUGUCCGUGG | 1172-1194 |
| AD-955343.1 | A-1803501.1 | 1541 | ACCACGGACAGUUCCCGUAUA | 1171-1191 | A-1803502.1 | 1676 | UAUACGGGAACUGUCCGUGGUAG | 1169-1191 |
| AD-955344.1 | A-1803503.1 | 1542 | CGGACAGUUCCCGUAUUCUUA | 1175-1195 | A-1803504.1 | 1677 | UAAGAAUACGGGAACUGUCCGUG | 1173-1195 |
| AD-955345.1 | A-1803505.1 | 1543 | GGACAGUUCCCGUAUUCUUGA | 1176-1196 | A-1803506.1 | 1678 | UCAAGAAUACGGGAACUGUCCGU | 1174-1196 |
| AD-955346.1 | A-1803507.1 | 1544 | GACAGUUCCCGUAUUCUUGGA | 1177-1197 | A-1803508.1 | 1679 | UCCAAGAAUACGGGAACUGUCCG | 1175-1197 |
| AD-955385.1 | A-1803585.1 | 1545 | CAGGCCUCUGGGUCAUUUACA | 1234-1254 | A-1803586.1 | 1680 | UGUAAAUGACCCAGAGGCCUGCU | 1232-1254 |
| AD-955386.1 | A-1803587.1 | 1546 | AGGCCUCUGGGUCAUUUACAA | 1235-1255 | A-1803588.1 | 1681 | UUGUAAAUGACCCAGAGGCCUGC | 1233-1255 |
| AD-955387.1 | A-1803589.1 | 1547 | GGCCUCUGGGUCAUUUACAGA | 1236-1256 | A-1803590.1 | 1682 | UCUGUAAAUGACCCAGAGGCCUG | 1234-1256 |
| AD-955415.1 | A-1803645.1 | 1548 | AGGCCAAAGGUGCCAUUGUCA | 1264-1284 | A-1803646.1 | 1683 | UGACAAUGGCACCUUUGGCCUCA | 1262-1284 |
| AD-955427.1 | A-1803669.1 | 1549 | CCAUUGUCCUCUCCAAACUGA | 1276-1296 | A-1803670.1 | 1684 | UCAGUUUGGAGAGGACAAUGGCA | 1274-1296 |
| AD-955504.1 | A-1803823.1 | 1550 | GUCGCCAAUGCCUUCAUCAUA | 1353-1373 | A-1803824.1 | 1685 | UAUGAUGAAGGCAUUGGCGACUG | 1351-1373 |
| AD-955570.1 | A-1803953.1 | 1551 | UACCGUCAACUUUGCUUAUGA | 1418-1438 | A-1803954.1 | 1686 | UCAUAAGCAAAGUUGACGGUAGC | 1416-1438 |
| AD-955571.1 | A-1803955.1 | 1552 | ACCGUCAACUUUGCUUAUGAA | 1419-1439 | A-1803956.1 | 1687 | UUCAUAAGCAAAGUUGACGGUAG | 1417-1439 |
| AD-955572.1 | A-1803957.1 | 1553 | CCGUCAACUUUGCUUAUGACA | 1420-1440 | A-1803958.1 | 1688 | UGUCAUAAGCAAAGUUGACGGUA | 1418-1440 |
| AD-955586.1 | A-1803985.1 | 1554 | UAUGACACAGGCACAGGUAUA | 1434-1454 | A-1803986.1 | 1689 | UAUACCUGUGCCUGUGUCAUAAG | 1432-1454 |
| AD-955612.1 | A-1804037.1 | 1555 | ACCCUGACCAUCCCAUUCAAA | 1461-1481 | A-1804038.1 | 1690 | UUUGAAUGGGAUGGUCAGGGUCU | 1459-1481 |
| AD-955615.1 | A-1804041.1 | 1556 | CAUCCCAUUCAAGAACCGCUA | 1469-1489 | A-1577531.1 | 1691 | UAGCGGUUCUUGAAUGGGAUGGU | 1467-1489 |
| AD-955617.1 | A-1804043.1 | 1557 | CCCUGACCAUCCCAUUCAAGA | 1462-1482 | A-1804044.1 | 1692 | UCUUGAAUGGGAUGGUCAGGGUC | 1460-1482 |
| AD-955620.1 | A-1804049.1 | 1558 | ACCAUCCCAUUCAAGAACCGA | 1467-1487 | A-1804050.1 | 1693 | UCGGUUCUUGAAUGGGAUGGUCA | 1465-1487 |
| AD-955621.1 | A-1804051.1 | 1559 | CCAUCCCAUUCAAGAACCGCA | 1468-1488 | A-1804052.1 | 1694 | UGCGGUUCUUGAAUGGGAUGGUC | 1466-1488 |
| AD-955641.1 | A-1804091.1 | 1560 | UAAGUACAGCAGCAUGAUUGA | 1490-1510 | A-1804092.1 | 1695 | UCAAUCAUGCUGCUGUACUUAUA | 1488-1510 |
| AD-955642.1 | A-1804093.1 | 1561 | AAGUACAGCAGCAUGAUUGAA | 1491-1511 | A-1804094.1 | 1696 | UUCAAUCAUGCUGCUGUACUUAU | 1489-1511 |
| AD-955644.1 | A-1804097.1 | 1562 | GUACAGCAGCAUGAUUGACUA | 1493-1513 | A-1804098.1 | 1697 | UAGUCAAUCAUGCUGCUGUACUU | 1491-1513 |
| AD-955664.1 | A-1804137.1 | 1563 | UCUUUGCCUGGGACAACUUGA | 1534-1554 | A-1804138.1 | 1698 | UCAAGUUGUCCCAGGCAAAGAGC | 1532-1554 |
| AD-955668.1 | A-1804144.1 | 1564 | CUUGAACAUGGUCACUUAUGA | 1550-1570 | A-1577509.1 | 1699 | UCAUAAGUGACCAUGUUCAAGUU | 1548-1570 |
| AD-955669.1 | A-1804145.1 | 1565 | UUGAACAUGGUCACUUAUGAA | 1551-1571 | A-1577563.1 | 1700 | UUCAUAAGUGACCAUGUUCAAGU | 1549-1571 |
| AD-955682.1 | A-1804170.1 | 1566 | UGAACAUGGUCACUUAUGACA | 1552-1572 | A-1804171.1 | 1701 | UGUCAUAAGUGACCAUGUUCAAG | 1550-1572 |
| AD-955702.1 | A-1804210.1 | 1567 | AUCAAGCUCUCCAAGAUGUGA | 1572-1592 | A-1804211.1 | 1702 | UCACAUCUUGGAGAGCUUGAUGU | 1570-1592 |
| AD-955703.1 | A-1804212.1 | 1568 | UCAAGCUCUCCAAGAUGUGAA | 1573-1593 | A-1804213.1 | 1703 | UUCACAUCUUGGAGAGCUUGAUG | 1571-1593 |
| AD-955851.1 | A-1804508.1 | 1569 | UUCAGGAAUUGUAGUCUGAGA | 1752-1772 | A-1804509.1 | 1704 | UCUCAGACUACAAUUCCUGAAUA | 1750-1772 |
| AD-955886.1 | A-1804578.1 | 1570 | UAUCUUCUGUCAGCAUUUAUA | 1804-1824 | A-1804579.1 | 1705 | UAUAAAUGCUGACAGAAGAUAAA | 1802-1824 |
| AD-955887.1 | A-1804580.1 | 1571 | AUCUUCUGUCAGCAUUUAUGA | 1805-1825 | A-1804581.1 | 1706 | UCAUAAAUGCUGACAGAAGAUAA | 1803-1825 |
| AD-955888.1 | A-1804582.1 | 1572 | UCUUCUGUCAGCAUUUAUGGA | 1806-1826 | A-1804583.1 | 1707 | UCCAUAAAUGCUGACAGAAGAUA | 1804-1826 |
| AD-955889.1 | A-1804584.1 | 1573 | CUUCUGUCAGCAUUUAUGGGA | 1807-1827 | A-1804585.1 | 1708 | UCCCAUAAAUGCUGACAGAAGAU | 1805-1827 |
| AD-955891.1 | A-1804588.1 | 1574 | UCUGUCAGCAUUUAUGGGAUA | 1809-1829 | A-1804589.1 | 1709 | UAUCCCAUAAAUGCUGACAGAAG | 1807-1829 |
| AD-955892.1 | A-1804590.1 | 1575 | CUGUCAGCAUUUAUGGGAUGA | 1810-1830 | A-1804591.1 | 1710 | UCAUCCCAUAAAUGCUGACAGAA | 1808-1830 |
| AD-955899.1 | A-1804604.1 | 1576 | CAUUUAUGGGAUGUUUAAUGA | 1817-1837 | A-1804605.1 | 1711 | UCAUUAAACAUCCCAUAAAUGCU | 1815-1837 |
| AD-955900.1 | A-1804606.1 | 1577 | AUUUAUGGGAUGUUUAAUGAA | 1818-1838 | A-1804607.1 | 1712 | UUCAUUAAACAUCCCAUAAAUGC | 1816-1838 |
| AD-955901.1 | A-1804608.1 | 1578 | UUUAUGGGAUGUUUAAUGACA | 1819-1839 | A-1804609.1 | 1713 | UGUCAUUAAACAUCCCAUAAAUG | 1817-1839 |
| AD-955908.1 | A-1804622.1 | 1579 | GAUGUUUAAUGACAUAGUUCA | 1826-1846 | A-1804623.1 | 1714 | UGAACUAUGUCAUUAAACAUCCC | 1824-1846 |
| AD-955917.1 | A-1804640.1 | 1580 | UGACAUAGUUCAAGUUUUCUA | 1835-1855 | A-1804641.1 | 1715 | UAGAAAACUUGAACUAUGUCAUU | 1833-1855 |
| AD-955918.1 | A-1804642.1 | 1581 | GACAUAGUUCAAGUUUUCUUA | 1836-1856 | A-1804643.1 | 1716 | UAAGAAAACUUGAACUAUGUCAU | 1834-1856 |
| AD-955919.1 | A-1804644.1 | 1582 | ACAUAGUUCAAGUUUUCUUGA | 1837-1857 | A-1804645.1 | 1717 | UCAAGAAAACUUGAACUAUGUCA | 1835-1857 |
| AD-955920.1 | A-1804646.1 | 1583 | UCUUCCUGAAAACCAUUGCUA | 1891-1911 | A-1577515.1 | 1718 | UAGCAAUGGUUUUCAGGAAGAAA | 1889-1911 |
| AD-955921.1 | A-1804647.1 | 1584 | CAUAGUUCAAGUUUUCUUGUA | 1838-1858 | A-1804648.1 | 1719 | UACAAGAAAACUUGAACUAUGUC | 1836-1858 |
| AD-955922.1 | A-1804649.1 | 1585 | AUAGUUCAAGUUUUCUUGUGA | 1839-1859 | A-1804650.1 | 1720 | UCACAAGAAAACUUGAACUAUGU | 1837-1859 |
| AD-955923.1 | A-1804651.1 | 1586 | UAGUUCAAGUUUUCUUGUGAA | 1840-1860 | A-1804652.1 | 1721 | UUCACAAGAAAACUUGAACUAUG | 1838-1860 |
| AD-955924.1 | A-1804653.1 | 1587 | AGUUCAAGUUUUCUUGUGAUA | 1841-1861 | A-1804654.1 | 1722 | UAUCACAAGAAAACUUGAACUAU | 1839-1861 |
| AD-955927.1 | A-1804659.1 | 1588 | UCAAGUUUUCUUGUGAUUUGA | 1844-1864 | A-1804660.1 | 1723 | UCAAAUCACAAGAAAACUUGAAC | 1842-1864 |
| AD-955962.1 | A-1804729.1 | 1589 | GAAAACCAUUGCUCUUGCAUA | 1898-1918 | A-1804730.1 | 1724 | UAUGCAAGAGCAAUGGUUUUCAG | 1896-1918 |
| AD-955963.1 | A-1804731.1 | 1590 | AAAACCAUUGCUCUUGCAUGA | 1899-1919 | A-1804732.1 | 1725 | UCAUGCAAGAGCAAUGGUUUUCA | 1897-1919 |
| AD-955969.1 | A-1804743.1 | 1591 | AUUGCUCUUGCAUGUUACAUA | 1905-1925 | A-1804744.1 | 1726 | UAUGUAACAUGCAAGAGCAAUGG | 1903-1925 |
| AD-955970.1 | A-1804745.1 | 1592 | UUGCUCUUGCAUGUUACAUGA | 1906-1926 | A-1804746.1 | 1727 | UCAUGUAACAUGCAAGAGCAAUG | 1904-1926 |
| AD-955971.1 | A-1804747.1 | 1593 | CUUGCAUGUUACAUGGUUACA | 1911-1931 | A-1577565.1 | 1728 | UGUAACCAUGUAACAUGCAAGAG | 1909-1931 |
| AD-955979.1 | A-1804757.1 | 1594 | CUCUUGCAUGUUACAUGGUUA | 1909-1929 | A-1804758.1 | 1729 | UAACCAUGUAACAUGCAAGAGCA | 1907-1929 |
| AD-955980.1 | A-1804759.1 | 1595 | UCUUGCAUGUUACAUGGUUAA | 1910-1930 | A-1804760.1 | 1730 | UUAACCAUGUAACAUGCAAGAGC | 1908-1930 |
| AD-956010.1 | A-1804819.1 | 1596 | AAAAGCAUAACUUCUAAAGGA | 1945-1965 | A-1804820.1 | 1731 | UCCUUUAGAAGUUAUGCUUUUUA | 1943-1965 |
| AD-956011.1 | A-1804821.1 | 1597 | AAAGCAUAACUUCUAAAGGAA | 1946-1966 | A-1804822.1 | 1732 | UUCCUUUAGAAGUUAUGCUUUUU | 1944-1966 |
| AD-956021.1 | A-1804841.1 | 1598 | UCUAAAGGAAGCAGAAUAGCA | 1957-1977 | A-1804842.1 | 1733 | UGCUAUUCUGCUUCCUUUAGAAG | 1955-1977 |
| AD-956022.1 | A-1804843.1 | 1599 | CUAAAGGAAGCAGAAUAGCUA | 1958-1978 | A-1804844.1 | 1734 | UAGCUAUUCUGCUUCCUUUAGAA | 1956-1978 |
| AD-956063.1 | A-1804925.1 | 1600 | AAGUAAGAUGCAUUUACUACA | 1999-2019 | A-1804926.1 | 1735 | UGUAGUAAAUGCAUCUUACUUAU | 1997-2019 |
| AD-956079.1 | A-1804955.1 | 1601 | UUCAGAUAGAAUACAGUUGGA | 2035-2055 | A-1577555.1 | 1736 | UCCAACUGUAUUCUAUCUGAAGC | 2033-2055 |
| AD-956087.1 | A-1804970.1 | 1602 | GUUGGCUUCUAAUGCUUCAGA | 2020-2040 | A-1804971.1 | 1737 | UCUGAAGCAUUAGAAGCCAACUG | 2018-2040 |
| AD-956092.1 | A-1804980.1 | 1603 | UCUAAUGCUUCAGAUAGAAUA | 2027-2047 | A-1804981.1 | 1738 | UAUUCUAUCUGAAGCAUUAGAAG | 2025-2047 |
| AD-956096.1 | A-1804988.1 | 1604 | AUGCUUCAGAUAGAAUACAGA | 2031-2051 | A-1804989.1 | 1739 | UCUGUAUUCUAUCUGAAGCAUUA | 2029-2051 |
| AD-956099.1 | A-1804994.1 | 1605 | CUUCAGAUAGAAUACAGUUGA | 2034-2054 | A-1804995.1 | 1740 | UCAACUGUAUUCUAUCUGAAGCA | 2032-2054 |

TABLE 4A

Exemplary Human MYOC siRNA Modified Single Strands and Duplex Sequences

| Duplex Name | Sense Sequence Name | SEQ ID NO: (Sense) | Sense Sequence (5′-3′) | Antisense Sequence Name | SEQ ID NO: (Antisense) | Antisense Sequence | mRNA Target Sequence | SEQ ID NO: |
|---|---|---|---|---|---|---|---|---|
| AD-956571.1 | A-1802311.1 | 1741 | csgsaga(Chd) AfaGfUfCfag uucuggaaL96 | A-1805498.1 | 1875 | VPusUfsccag (Agn)acugac UfuGfucucgs gsa | UCCGAGACAAGUCAGUUCUGGAG | 3186 |
| AD-956690.1 | A-1802623.1 | 1742 | gsgscuc(Chd) AfgAfGfAfa guuucuacaL9 6 | A-1805617.1 | 1876 | VPusGfsuaga (Agn)acuucu CfuGfgagccs usg | CAGGCUCCAGAGAAGUUUCUACG | 3187 |
| AD-956709.1 | A-1802661.1 | 1743 | csgsugg(Ahd)AfuUfUfGfg acacuuugaL9 6 | A-1805636.1 | 1877 | VPusCfsaaag (Tgn)guccaa AfuUfccacgs usa | UACGUGGAAUUUGGACACUUUGG | 3188 |
| AD-956710.1 | A-1802663.1 | 1744 | gsusgga(Ahd)UfuUfGfGfa cacuuuggaL9 6 | A-1805637.1 | 1878 | VPusCfscaaa (Ggn)ugucca AfaUfuccacs gsu | ACGUGGAAUUUGGACACUUUGGC | 3189 |
| AD-956732.1 | A-1802705.1 | 1745 | ususcca(Ghd) GfaAfCfUfga aguccgaaL96 | A-1805659.1 | 1879 | VPusUfscgga (Cgn)uucagu UfcCfuggaas gsg | CCUUCCAGGAACUGAAGUCCGAG | 3190 |
| AD-956741.1 | A-1802726.1 | 1746 | csusgaa(Ghd) UfcCfGfAfgc uaacugaaL96 | A-1805668.1 | 1880 | VPusUfscagu (Tgn)agcucg GfaCfuucags usu | AACUGAAGUCCGAGCUAACUGAA | 3191 |
| AD-956744.1 | A-1802732.1 | 1747 | asasguc(Chd) GfaGfCfUfaa cugaaguaL96 | A-1805671.1 | 1881 | VPusAfscuuc (Agn)guuagc UfcGfgacuus csa | UGAAGUCCGAGCUAACUGAAGUU | 3192 |
| AD-956745.1 | A-1802734.1 | 1748 | asgsucc(Ghd) AfgCfUfAfac ugaaguuaL96 | A-1805672.1 | 1882 | VPusAfsacuu (Cgn)aguuag CfuCfggacus use | GAAGUCCGAGCUAACUGAAGUUC | 3193 |
| AD-956746.1 | A-1802713.1 | 1749 | gsuseeg(Ahd) GfcUfAfAfc ugaaguucaL9 6 | A-1805673.1 | 1883 | VPusGfsaacu (Tgn)caguua GfcUfcggacs usu | AAGUCCGAGCUAACUGAAGUUCC | 3194 |
| AD-956747.1 | A-1802714.1 | 1750 | usesega(Ghd) CfuAfAfCfu gaaguuccaL9 6 | A-1805674.1 | 1884 | VPusGfsgaac (Tgn)ucaguu AfgCfucggas csu | AGUCCGAGCUAACUGAAGUUC CU | 3195 |
| AD-956748.1 | A-1802736.1 | 1751 | cscsgag(Chd) UfaAfCfUfga aguuccuaL96 | A-1805675.1 | 1885 | VPusAfsggaa (Cgn)uucagu UfaGfcucggs ase | GUCCGAGCUAACUGAAGUUCCUG | 3196 |
| AD-956749.1 | A-1802738.1 | 1752 | esgsage(Uhd) AfaCfUfGfaa guuccugaL96 | A-1805676.1 | 1886 | VPusCfsagga (Agn)cuucag UfuAfgcucgs gsa | UCCGAGCUAACUGAAGUUCCUGC | 3197 |
| AD-956760.1 | A-1802760.1 | 1753 | asasguu(Chd) CfuGfCfUfuc ccgaauuaL96 | A-1805687.1 | 1887 | VPusAfsauuc (Ggn)ggaage AfgGfaacuus csa | UGAAGUUCCUGCUUCCCGAAUUU | 3198 |
| AD-956761.1 | A-1802762.1 | 1754 | asgsuuc(Chd) UfgCfUfUfcc cgaauuuaL96 | A-1805688.1 | 1888 | VPusAfsaauu (Cgn)gggaag CfaGfgaacus use | GAAGUUCCUGCUUCCCGAAUUUU | 3199 |
| AD-956762.1 | A-1802764.1 | 1755 | gsusucc(Uhd) GfcUfUfCfcc gaauuuuaL96 | A-1805689.1 | 1889 | VPusAfsaaau (Tgn)cgggaa GfcAfggaacs usu | AAGUUCCUGCUUCCCGAAUUUUG | 3200 |
| AD-956763.1 | A-1802715.1 | 1756 | ususccu(Ghd) CfuUfCfCfcg aauuuugaL96 | A-1805690.1 | 1890 | VPusCfsaaaa (Tgn)ucggga AfgCfaggaas csu | AGUUCCUGCUUCCCGAAUUUUGA | 3201 |
| AD-956764.1 | A-1802766.1 | 1757 | uscscug(Chd) UfuCfCfCfga auuuugaaL96 | A-1805691.1 | 1891 | VPusUfscaaa (Agn)uucggg AfaGfcaggas asc | GUUCCUGCUUCCCGAAUUUUGAA | 3202 |
| AD-956765.1 | A-1802768.1 | 1758 | cscsugc(Uhd) UfcCfCfGfaa uuuugaaaL96 | A-1805692.1 | 1892 | VPusUfsucaa (Agn)auucgg GfaAfgcaggs asa | UUCCUGCUUCCCGAAUUUUGAAG | 3203 |
| AD-956766.1 | A-1802770.1 | 1759 | csusgcu(Uhd) CfcCfGfAfau uuugaagaL96 | A-1805693.1 | 1893 | VPusCfsuuca (Agn)aauucg GfgAfagcags gsa | UCCUGCUUCCCGAAUUUUGAAGG | 3204 |
| AD-956769.1 | A-1802776.1 | 1760 | csusucc(Chd) GfaAfUfUfu ugaaggagaL9 6 | A-1805696.1 | 1894 | VPusCfsuccu (Tgn)caaaau UfcGfggaags csa | UGCUUCCCGAAUUUUGAAGGAGA | 3205 |
| AD-956827.1 | A-1802818.1 | 1761 | csgsgau(Ghd) UfgGfAfGfa acuaguuuaL9 6 | A-1805754.1 | 1895 | VPusAfsaacu (Agn)guucuc CfaCfauccgs gsu | ACCGGAUGUGGAGAACUAGUUUG | 3206 |
| AD-956828.1 | A-1802819.1 | 1762 | gsgsaug(Uhd )GfgAfGfAfa cuaguuugaL9 6 | A-1805755.1 | 1896 | VPusCfsaaac (Tgn)aguucu CfcAfcauccs gsg | CCGGAUGUGGAGAACUAGUUUGG | 3207 |
| AD-956831.1 | A-1802896.1 | 1763 | usgsugg(Ahd )GfaAfCfUfa guuuggguaL9 6 | A-1805758.1 | 1897 | VPusAfsccca (Agn)acuagu UfcUfccacas use | GAUGUGGAGAACUAGUUUGGGUA | 3208 |
| AD-956872.1 | A-1802979.1 | 1764 | asascag(Chd) AfgAfAfAfc aauuacugaL9 6 | A-1805799.1 | 1898 | VPusCfsagua (Agn)uuguuu CfuGfcuguus csu | AGAACAGCAGAAACAAUUACUGG | 3209 |
| AD-956873.1 | A-1802981.1 | 1765 | ascsagc(Ahd) GfaAfAfCfaa uuacuggaL96 | A-1805800.1 | 1899 | VPusCfscagu (Agn)auuguu UfcUfgcugus use | GAACAGCAGAAACAAUUACUGGC | 3210 |
| AD-956874.1 | A-1802983.1 | 1766 | csasgca(Ghd) AfaAfCfAfau uacuggcaL96 | A-1805801.1 | 1900 | VPusGfsccag (Tgn)aauugu UfuCfugcugs usu | AACAGCAGAAACAAUUACUGGCA | 3211 |
| AD-956877.1 | A-1802920.1 | 1767 | csasgaa(Ahd) CfaAfUfUfac uggcaagaL96 | A-1805804.1 | 1901 | VPusCfsuugc (Cgn)aguaau UfgUfuucugs csu | AGCAGAAACAAUUACUGGCAAGU | 3212 |
| AD-956880.1 | A-1802993.1 | 1768 | asasaca(Ahd) UfuAfCfUfg gcaaguauaL9 6 | A-1805807.1 | 1902 | VPusAfsuacu (Tgn)gccagu AfaUfuguuus csu | AGAAACAAUUACUGGCAAGUAUG | 3213 |
| AD-956881.1 | A-1802995.1 | 1769 | asascaa(Uhd) UfaCfUfGfgc aaguaugaL96 | A-1805808.1 | 1903 | VPusCfsauac (Tgn)ugccag UfaAfuuguus use | GAAACAAUUACUGGCAAGUAUGG | 3214 |
| AD-956887.1 | A-1803007.1 | 1770 | usascug(Ghd) CfaAfGfUfau gguguguaL96 | A-1805814.1 | 1904 | VPusAfscaca (Cgn)cauacu UfgCfcaguas asu | AUUACUGGCAAGUAUGGUGUGUG | 3215 |
| AD-956947.1 | A-1803121.1 | 1771 | uscscgc(Chd) AfgGfUfUfu uugaguauaL9 6 | A-1805874.1 | 1905 | VPusAfsuacu (Cgn)aaaaac CfuGfgcggas csa | UGUCCGCCAGGUUUUUGAGUAUG | 3216 |
| AD-956949.1 | A-1803123.1 | 1772 | csgscca(Ghd) GfuUfUfUfu gaguaugaaL9 6 | A-1805876.1 | 1906 | VPusUfscaua (Cgn)ucaaaa AfcCfuggcgs gsa | UCCGCCAGGUUUUUGAGUAUGAC | 3217 |
| AD-956958.1 | A-1803152.1 | 1773 | ususuga(Ghd )UfaUfGfAfc cucaucagaL9 6 | A-1805885.1 | 1907 | VPusCfsugau (Ggn)agguca UfaCfucaaas asa | UUUUUGAGUAUGACCUCAUCAGC | 3218 |
| AD-956967.1 | A-1803124.1 | 1774 | gsasccu(Chd) AfuCfAfGfcc aguuuauaL96 | A-1805894.1 | 1908 | VPusAfsuaaa (Cgn)uggcug AfuGfaggucs asu | AUGACCUCAUCAGCCAGUUUAUG | 3219 |
| AD-956968.1 | A-1803170.1 | 1775 | ascscuc(Ahd) UfcAfGfCfca guuuaugaL96 | A-1805895.1 | 1909 | VPusCfsauaa (Agn)cuggcu GfaUfgaggus csa | UGACCUCAUCAGCCAGUUUAUGC | 3220 |
| AD-956992.1 | A-1803125.1 | 1776 | gscsuac(Chd) CfuUfCfUfaa gguucacaL96 | A-1805919.1 | 1910 | VPusGfsugaa (Cgn)cuuaga AfgGfguagcs csc | GGGCUACCCUUCUAAGGUUCACA | 3221 |
| AD-956998.1 | A-1803220.1 | 1777 | csusucu(Ahd) AfgGfUfUfc acauacugaL9 6 | A-1805925.1 | 1911 | VPusCfsagua (Tgn)gugaac CfuUfagaags gsg | CCCUUCUAAGGUUCACAUACUGC | 3222 |
| AD-956999.1 | A-1803222.1 | 1778 | ususcua(Ahd) GfgUfUfCfac auacugcaL96 | A-1805926.1 | 1912 | VPusGfscagu (Agn)ugugaa CfcUfuagaas gsg | CCUUCUAAGGUUCACAUACUGCC | 3223 |
| AD-957000.1 | A-1803224.1 | 1779 | uscsuaa(Ghd) GfuUfCfAfca uacugccaL96 | A-1805927.1 | 1913 | VPusGfsgcag (Tgn)auguga AfcCfuuagas asg | CUUCUAAGGUUCACAUACUGCCU | 3224 |
| AD-957063.1 | A-1803331.1 | 1780 | gsasguc(Chd) AfgAfAfCfu gucauaagaL9 6 | A-1805990.1 | 1914 | VPusCfsuuau (Ggn)acaguu CfuGfgacucs asg | CUGAGUCCAGAACUGUCAUAAGA | 3225 |
| AD-957064.1 | A-1803350.1 | 1781 | asgsucc(Ahd) GfaAfCfUfg ucauaagaaL9 6 | A-1805991.1 | 1915 | VPusUfscuua (Tgn)gacagu UfcUfggacus csa | UGAGUCCAGAACUGUCAUAAGAU | 3226 |
| AD-957065.1 | A-1803352.1 | 1782 | gsuscca(Ghd) AfaCfUfGfuc auaagauaL96 | A-1805992.1 | 1916 | VPusAfsucuu (Agn)ugacag UfuCfuggacs use | GAGUCCAGAACUGUCAUAAGAUA | 3227 |
| AD-957068.1 | A-1803358.1 | 1783 | csasgaa(Chd) UfgUfCfAfu aagauaugaL9 6 | A-1805995.1 | 1917 | VPusCfsauau (Cgn)uuauga CfaGfuucugs gsa | UCCAGAACUGUCAUAAGAUAUGA | 3228 |
| AD-957069.1 | A-1803360.1 | 1784 | asgsaac(Uhd) GfuCfAfUfaa gauaugaaL96 | A-1805996.1 | 1918 | VPusUfscaua (Tgn)cuuaug AfcAfguucus gsg | CCAGAACUGUCAUAAGAUAUGAG | 3229 |
| AD-957070.1 | A-1803362.1 | 1785 | gsasacu(Ghd) UfcAfUfAfa gauaugagaL9 6 | A-1805997.1 | 1919 | VPusCfsucau (Agn)ucuuau GfaCfaguucs usg | CAGAACUGUCAUAAGAUAUGAGC | 3230 |
| AD-957071.1 | A-1803364.1 | 1786 | asascug(Uhd) CfaUfAfAfga uaugagcaL96 | A-1805998.1 | 1920 | VPusGfscuca (Tgn)aucuua UfgAfcaguus csu | AGAACUGUCAUAAGAUAUGAGCU | 3231 |
| AD-957073.1 | A-1803368.1 | 1787 | csusguc(Ahd) UfaAfGfAfu augagcugaL9 6 | A-1806000.1 | 1921 | VPusCfsagcu (Cgn)auaucu UfaUfgacags usu | AACUGUCAUAAGAUAUGAGCUGA | 3232 |
| AD-957079.1 | A-1803380.1 | 1788 | usasaga(Uhd) AfuGfAfGfc ugaauaccaL9 6 | A-1806006.1 | 1922 | VPusGfsguau (Tgn)cagcuc AfuAfucuuas usg | CAUAAGAUAUGAGCUGAAUACCG | 3233 |
| AD-957081.1 | A-1803384.1 | 1789 | asgsaua(Uhd) GfaGfCfUfga auaccgaaL96 | A-1806008.1 | 1923 | VPusUfscggu (Agn)uucagc UfcAfuaucus usa | UAAGAUAUGAGCUGAAUACCGAG | 3234 |
| AD-957083.1 | A-1803388.1 | 1790 | asusaug(Ahd) GfcUfGfAfa uaccgagaaL9 6 | A-1806010.1 | 1924 | VPusUfscucg (Ggn)uauuca GfcUfcauaus csu | AGAUAUGAGCUGAAUACCGAGAC | 3235 |
| AD-957141.1 | A-1803435.1 | 1791 | csascgg(Ahd) CfaGfUfUfcc cguauucaL96 | A-1806068.1 | 1925 | VPusGfsaaua (Cgn)gggaac UfgUfccgugs gsu | ACCACGGACAGUUCCCGUAUUCU | 3236 |
| AD-957142.1 | A-1803436.1 | 1792 | ascsgga(Chd) AfgUfUfCfcc guauucuaL96 | A-1806069.1 | 1926 | VPusAfsgaau (Agn)cgggaa CfuGfuccgus gsg | CCACGGACAGUUCCCGUAUUCUU | 3237 |
| AD-957144.1 | A-1803505.1 | 1793 | gsgsaca(Ghd) UfuCfCfCfgu auucuugaL96 | A-1806071.1 | 1927 | VPusCfsaaga (Agn)uacggg AfaCfuguccs gsu | ACGGACAGUUCCCGUAUUCUUGG | 3238 |
| AD-957368.1 | A-1803953.1 | 1794 | usasccg(Uhd) CfaAfCfUfuu gcuuaugaL96 | A-1806295.1 | 1928 | VPusCfsauaa (Ggn)caaagu UfgAfcgguas gsc | GCUACCGUCAACUUUGCUUAUGA | 3239 |
| AD-957369.1 | A-1803955.1 | 1795 | ascscgu(Chd) AfaCfUfUfu gcuuaugaaL9 6 | A-1806296.1 | 1929 | VPusUfscaua (Agn)gcaaag UfuGfacggus asg | CUACCGUCAACUUUGCUUAUGAC | 3240 |
| AD-957370.1 | A-1803957.1 | 1796 | cscsguc(Ahd) AfcUfUfUfg cuuaugacaL9 6 | A-1806297.1 | 1930 | VPusGfsucau (Agn)agcaaa GfuUfgacggs usa | UACCGUCAACUUUGCUUAUGACA | 3241 |
| AD-957371.1 | A-1803959.1 | 1797 | csgsuca(Ahd) CfuUfUfGfc uuaugacaaL9 6 | A-1806298.1 | 1931 | VPusUfsguca (Tgn)aagcaa AfgUfugacgs gsu | ACCGUCAACUUUGCUUAUGACAC | 3242 |
| AD-957439.1 | A-1804089.1 | 1798 | asusaag(Uhd) AfcAfGfCfag caugauuaL96 | A-1806366.1 | 1932 | VPusAfsauca (Tgn)gcugcu GfuAfcuuaus asg | CUAUAAGUACAGCAGCAUGAUUG | 3243 |
| AD-957440.1 | A-1804091.1 | 1799 | usasagu(Ahd) CfaGfCfAfgc augauugaL96 | A-1806367.1 | 1933 | VPusCfsaauc (Agn)ugcugc UfgUfacuuas usa | UAUAAGUACAGCAGCAUGAUUGA | 3244 |
| AD-957443.1 | A-1804097.1 | 1800 | gsusaca(Ghd) CfaGfCfAfug auugacuaL96 | A-1806370.1 | 1934 | VPusAfsguca (Agn)ucaugc UfgCfuguacs usu | AAGUACAGCAGCAUGAUUGACUA | 3245 |
| AD-957465.1 | A-1804141.1 | 1801 | ususugc(Chd) UfgGfGfAfc aacuugaaaL9 6 | A-1806392.1 | 1935 | VPusUfsucaa (Ggn)uugucc CfaGfgcaaas gsa | UCUUUGCCUGGGACAACUUGAAC | 3246 |
| AD-957479.1 | A-1804144.1 | 1802 | csusuga(Ahd) CfaUfGfGfuc acuuaugaL96 | A-1806406.1 | 1936 | VPusCfsauaa (Ggn)ugacca UfgUfucaags usu | AACUUGAACAUGGUCACUUAUGA | 3247 |
| AD-957480.1 | A-1804145.1 | 1803 | ususgaa(Chd) AfuGfGfUfc acuuaugaaL9 6 | A-1806407.1 | 1937 | VPusUfscaua (Agn)gugacc AfuGfuucaas gsu | ACUUGAACAUGGUCACUUAUGAC | 3248 |
| AD-957481.1 | A-1804170.1 | 1804 | usgsaac(Ahd) UfgGfUfCfac uuaugacaL96 | A-1806408.1 | 1938 | VPusGfsucau (Agn)agugac CfaUfguucas asg | CUUGAACAUGGUCACUUAUGACA | 3249 |
| AD-957482.1 | A-1804172.1 | 1805 | gsasaca(Uhd) GfgUfCfAfc uuaugacaaL9 6 | A-1806409.1 | 1939 | VPusUfsguca (Tgn)aaguga CfcAfuguucs asa | UUGAACAUGGUCACUUAUGACAU | 3250 |
| AD-957487.1 | A-1804182.1 | 1806 | usgsguc(Ahd )CfuUfAfUfg acaucaagaL9 6 | A-1806414.1 | 1940 | VPusCfsuuga (Tgn)gucaua AfgUfgaccas usg | CAUGGUCACUUAUGACAUCAAGC | 3251 |
| AD-957488.1 | A-1804184.1 | 1807 | gsgsuca(Chd) UfuAfUfGfa caucaagcaL9 6 | A-1806415.1 | 1941 | VPusGfscuug (Agn)ugucau AfaGfugaccs asu | AUGGUCACUUAUGACAUCAAGCU | 3252 |
| AD-957489.1 | A-1804186.1 | 1808 | gsuscac(Uhd) UfaUfGfAfca ucaagcuaL96 | A-1806416.1 | 1942 | VPusAfsgcuu (Ggn)auguca UfaAfgugacs csa | UGGUCACUUAUGACAUCAAGCUC | 3253 |
| AD-957490.1 | A-1804188.1 | 1809 | uscsacu(Uhd) AfuGfAfCfa ucaagcucaL9 6 | A-1806417.1 | 1943 | VPusGfsagcu (Tgn)gauguc AfuAfagugas CSC | GGUCACUUAUGACAUCAAGCUCU | 3254 |
| AD-957500.1 | A-1804208.1 | 1810 | csasuca(Ahd) GfcUfCfUfcc aagauguaL96 | A-1806427.1 | 1944 | VPusAfscauc (Tgn)uggaga GfcUfugaugs use | GACAUCAAGCUCUCCAAGAUGUG | 3255 |
| AD-957506.1 | A-1804220.1 | 1811 | gscsucu(Chd) CfaAfGfAfu gugaaaagaL9 6 | A-1806433.1 | 1945 | VPusCfsuuuu (Cgn)acaucu UfgGfagagcs usu | AAGCUCUCCAAGAUGUGAAAAGC | 3256 |
| AD-957508.1 | A-1804224.1 | 1812 | uscsucc(Ahd) AfgAfUfGfu gaaaagccaL9 6 | A-1806435.1 | 1946 | VPusGfsgcuu (Tgn)ucacau CfuUfggagas gsc | GCUCUCCAAGAUGUGAAAAGCCU | 3257 |
| AD-957650.1 | A-1804508.1 | 1813 | ususcag(Ghd) AfaUfUfGfu agucugagaL9 6 | A-1806577.1 | 1947 | VPusCfsucag (Agn)cuacaa UfuCfcugaas usa | UAUUCAGGAAUUGUAGUCUGAGG | 3258 |
| AD-957685.1 | A-1804578.1 | 1814 | usasucu(Uhd) CfuGfUfCfag cauuuauaL96 | A-1806612.1 | 1948 | VPusAfsuaaa (Tgn)gcugac AfgAfagauas asa | UUUAUCUUCUGUCAGCAUUUAUG | 3259 |
| AD-957686.1 | A-1804580.1 | 1815 | asuscuu(Chd) UfgUfCfAfg cauuuaugaL9 6 | A-1806613.1 | 1949 | VPusCfsauaa (Agn)ugcuga CfaGfaagaus asa | UUAUCUUCUGUCAGCAUUUAUGG | 3260 |
| AD-957687.1 | A-1804582.1 | 1816 | uscsuuc(Uhd) GfuCfAfGfca uuuauggaL96 | A-1806614.1 | 1950 | VPusCfscaua (Agn)augcug AfcAfgaagas usa | UAUCUUCUGUCAGCAUUUAUGGG | 3261 |
| AD-957688.1 | A-1804584.1 | 1817 | csusucu(Ghd) UfcAfGfCfau uuaugggaL96 | A-1806615.1 | 1951 | VPusCfsccau (Agn)aaugcu GfaCfagaags asu | AUCUUCUGUCAGCAUUUAUGGGA | 3262 |
| AD-957690.1 | A-1804588.1 | 1818 | uscsugu(Chd) AfgCfAfUfu uaugggauaL9 6 | A-1806617.1 | 1952 | VPusAfsuccc (Agn)uaaaug CfuGfacagas asg | CUUCUGUCAGCAUUUAUGGGAUG | 3263 |
| AD-957691.1 | A-1804590.1 | 1819 | csusguc(Ahd) GfcAfUfUfu augggaugaL9 6 | A-1806618.1 | 1953 | VPusCfsaucc (Cgn)auaaau GfcUfgacags asa | UUCUGUCAGCAUUUAUGGGAUGU | 3264 |
| AD-957694.1 | A-1804596.1 | 1820 | uscsagc(Ahd) UfuUfAfUfg ggauguuuaL9 6 | A-1806621.1 | 1954 | VPusAfsaaca (Tgn)cccaua AfaUfgcugas csa | UGUCAGCAUUUAUGGGAUGUUUA | 3265 |
| AD-957695.1 | A-1804598.1 | 1821 | csasgca(Uhd) UfuAfUfGfg gauguuuaaL9 6 | A-1806622.1 | 1955 | VPusUfsaaac (Agn)ucccau AfaAfugcugs ase | GUCAGCAUUUAUGGGAUGUUUAA | 3266 |
| AD-957696.1 | A-1804600.1 | 1822 | asgscau(Uhd) UfaUfGfGfg auguuuaaaL9 6 | A-1806623.1 | 1956 | VPusUfsuaaa (Cgn)auccca UfaAfaugcus gsa | UCAGCAUUUAUGGGAUGUUUAAU | 3267 |
| AD-957698.1 | A-1804604.1 | 1823 | csasuuu(Ahd) UfgGfGfAfu guuuaaugaL9 6 | A-1806625.1 | 1957 | VPusCfsauua (Agn)acaucc CfaUfaaaugs csu | AGCAUUUAUGGGAUGUUUAAUGA | 3268 |
| AD-957699.1 | A-1804606.1 | 1824 | asusuua(Uhd) GfgGfAfUfg uuuaaugaaL9 6 | A-1806626.1 | 1958 | VPusUfscauu (Agn)aacauc CfcAfuaaaus gsc | GCAUUUAUGGGAUGUUUAAUGAC | 3269 |
| AD-957706.1 | A-1804620.1 | 1825 | gsgsaug(Uhd )UfuAfAfUfg acauaguuaL9 6 | A-1806633.1 | 1959 | VPusAfsacua (Tgn)gucauu AfaAfcauccs csa | UGGGAUGUUUAAUGACAUAGUUC | 3270 |
| AD-957707.1 | A-1804622.1 | 1826 | gsasugu(Uhd )UfaAfUfGfa cauaguucaL9 6 | A-1806634.1 | 1960 | VPusGfsaacu (Agn)ugucau UfaAfacaucs CSC | GGGAUGUUUAAUGACAUAGUUCA | 3271 |
| AD-957708.1 | A-1804624.1 | 1827 | asusguu(Uhd )AfaUfGfAfc auaguucaaL9 6 | A-1806635.1 | 1961 | VPusUfsgaac (Tgn)auguca UfuAfaacaus CSC | GGAUGUUUAAUGACAUAGUUCAA | 3272 |
| AD-957710.1 | A-1804628.1 | 1828 | gsusuua(Ahd )UfgAfCfAfu aguucaagaL9 6 | A-1806637.1 | 1962 | VPusCfsuuga (Agn)cuaugu CfaUfuaaacs asu | AUGUUUAAUGACAUAGUUCAAGU | 3273 |
| AD-957711.1 | A-1804630.1 | 1829 | ususuaa(Uhd) GfaCfAfUfag uucaaguaL96 | A-1806638.1 | 1963 | VPusAfscuug (Agn)acuaug UfcAfuuaaas csa | UGUUUAAUGACAUAGUUCAAGUU | 3274 |
| AD-957716.1 | A-1804640.1 | 1830 | usgsaca(Uhd) AfgUfUfCfaa guuuucuaL96 | A-1806643.1 | 1964 | VPusAfsgaaa (Agn)cuugaa CfuAfugucas usu | AAUGACAUAGUUCAAGUUUUCUU | 3275 |
| AD-957717.1 | A-1804642.1 | 1831 | gsascau(Ahd) GfuUfCfAfa guuuucuuaL9 6 | A-1806644.1 | 1965 | VPusAfsagaa (Agn)acuuga AfcUfaugucs asu | AUGACAUAGUUCAAGUUUUCUUG | 3276 |
| AD-957718.1 | A-1804644.1 | 1832 | ascsaua(Ghd) UfuCfAfAfg uuuucuugaL9 6 | A-1806645.1 | 1966 | VPusCfsaaga (Agn)aacuug AfaCfuaugus csa | UGACAUAGUUCAAGUUUUCUUGU | 3277 |
| AD-957719.1 | A-1804647.1 | 1833 | csasuag(Uhd) UfcAfAfGfu uuucuuguaL9 6 | A-1806646.1 | 1967 | VPusAfscaag (Agn)aaacuu GfaAfcuaugs use | GACAUAGUUCAAGUUUUCUUGUG | 3278 |
| AD-957720.1 | A-1804649.1 | 1834 | asusagu(Uhd) CfaAfGfUfu uucuugugaL9 6 | A-1806647.1 | 1968 | VPusCfsacaa (Ggn)aaaacu UfgAfacuaus gsu | ACAUAGUUCAAGUUUUCUUGUGA | 3279 |
| AD-957721.1 | A-1804651.1 | 1835 | usasguu(Chd) AfaGfUfUfu ucuugugaaL9 6 | A-1806648.1 | 1969 | VPusUfscaca (Agn)gaaaac UfuGfaacuas usg | CAUAGUUCAAGUUUUCUUGUGAU | 3280 |
| AD-957722.1 | A-1804653.1 | 1836 | asgsuuc(Ahd) AfgUfUfUfu cuugugauaL9 6 | A-1806649.1 | 1970 | VPusAfsucac (Agn)agaaaa CfuUfgaacus asu | AUAGUUCAAGUUUUCUUGUGAUU | 3281 |
| AD-957723.1 | A-1804655.1 | 1837 | gsusuca(Ahd) GfuUfUfUfc uugugauuaL9 6 | A-1806650.1 | 1971 | VPusAfsauca (Cgn)aagaaa AfcUfugaacs usa | UAGUUCAAGUUUUCUUGUGAUUU | 3282 |
| AD-957725.1 | A-1804659.1 | 1838 | uscsaag(Uhd) UfuUfCfUfu gugauuugaL9 6 | A-1806652.1 | 1972 | VPusCfsaaau (Cgn)acaaga AfaAfcuugas asc | GUUCAAGUUUUCUUGUGAUUUGG | 3283 |
| AD-957748.1 | A-1804705.1 | 1839 | asusagu(Uhd) UfcUfUfCfcu gaaaaccaL96 | A-1806675.1 | 1973 | VPusGfsguu u(Tgn)caggaa GfaAfacuaus usa | UAAUAGUUUCUUCCUGAAAACCA | 3284 |
| AD-957753.1 | A-1804715.1 | 1840 | ususcuu(Chd) CfuGfAfAfaa ccauugcaL96 | A-1806680.1 | 1974 | VPusGfscaau (Ggn)guuuuc AfgGfaagaas asc | GUUUCUUCCUGAAAACCAUUGCU | 3285 |
| AD-957754.1 | A-1804646.1 | 1841 | uscsuuc(Chd) UfgAfAfAfa ccauugcuaL9 6 | A-1806681.1 | 1975 | VPusAfsgcaa (Tgn)gguuuu CfaGfgaagas asa | UUUCUUCCUGAAAACCAUUGCUC | 3286 |
| AD-957756.1 | A-1804719.1 | 1842 | ususccu(Ghd) AfaAfAfCfca uugcucuaL96 | A-1806683.1 | 1976 | VPusAfsgage (Agn)augguu UfuCfaggaas gsa | UCUUCCUGAAAACCAUUGCUCUU | 3287 |
| AD-957761.1 | A-1804729.1 | 1843 | gsasaaa(Chd) CfaUfUfGfcu cuugcauaL96 | A-1806688.1 | 1977 | VPusAfsugca (Agn)gagcaa UfgGfuuuucs asg | CUGAAAACCAUUGCUCUUGCAUG | 3288 |
| AD-957762.1 | A-1804731.1 | 1844 | asasaac(Chd) AfuUfGfCfu cuugcaugaL9 6 | A-1806689.1 | 1978 | VPusCfsauge (Agn)agagca AfuGfguuuus csa | UGAAAACCAUUGCUCUUGCAUGU | 3289 |
| AD-957764.1 | A-1804735.1 | 1845 | asascca(Uhd) UfgCfUfCfu ugcauguuaL9 6 | A-1806691.1 | 1979 | VPusAfsacau (Ggn)caagag CfaAfugguus usu | AAAACCAUUGCUCUUGCAUGUUA | 3290 |
| AD-957765.1 | A-1804737.1 | 1846 | ascscau(Uhd) GfcUfCfUfu gcauguuaaL9 6 | A-1806692.1 | 1980 | VPusUfsaaca (Tgn)gcaaga GfcAfauggus usu | AAACCAUUGCUCUUGCAUGUUAC | 3291 |
| AD-957766.1 | A-1804739.1 | 1847 | cscsauu(Ghd) CfuCfUfUfgc auguuacaL96 | A-1806693.1 | 1981 | VPusGfsuaac (Agn)ugcaag AfgCfaauggs usu | AACCAUUGCUCUUGCAUGUUACA | 3292 |
| AD-957767.1 | A-1804741.1 | 1848 | csasuug(Chd) UfcUfUfGfca uguuacaaL96 | A-1806694.1 | 1982 | VPusUfsguaa (Cgn)augcaa GfaGfcaaugs gsu | ACCAUUGCUCUUGCAUGUUACAU | 3293 |
| AD-957768.1 | A-1804743.1 | 1849 | asusugc(Uhd) CfuUfGfCfau guuacauaL96 | A-1806695.1 | 1983 | VPusAfsugua (Agn)caugca AfgAfgcaaus gsg | CCAUUGCUCUUGCAUGUUACAUG | 3294 |
| AD-957769.1 | A-1804745.1 | 1850 | ususgcu(Chd) UfuGfCfAfu guuacaugaL9 6 | A-1806696.1 | 1984 | VPusCfsaugu (Agn)acaugc AfaGfagcaas usg | CAUUGCUCUUGCAUGUUACAUGG | 3295 |
| AD-957770.1 | A-1804753.1 | 1851 | usgscuc(Uhd) UfgCfAfUfg uuacauggaL9 6 | A-1806697.1 | 1985 | VPusCfscaug (Tgn)aacaug CfaAfgagcas asu | AUUGCUCUUGCAUGUUACAUGGU | 3296 |
| AD-957771.1 | A-1804755.1 | 1852 | gscsucu(Uhd) GfcAfUfGfu uacaugguaL9 6 | A-1806698.1 | 1986 | VPusAfsccau (Ggn)uaacau GfcAfagagcs asa | UUGCUCUUGCAUGUUACAUGGUU | 3297 |
| AD-957772.1 | A-1804757.1 | 1853 | csuscuu(Ghd) CfaUfGfUfua caugguuaL96 | A-1806699.1 | 1987 | VPusAfsacca (Tgn)guaaca UfgCfaagags csa | UGCUCUUGCAUGUUACAUGGUUA | 3298 |
| AD-957773.1 | A-1804759.1 | 1854 | uscsuug(Chd) AfuGfUfUfa caugguuaaL9 6 | A-1806700.1 | 1988 | VPusUfsaacc (Agn)uguaac AfuGfcaagas gsc | GCUCUUGCAUGUUACAUGGUUAC | 3299 |
| AD-957774.1 | A-1804747.1 | 1855 | csusugc(Ahd) UfgUfUfAfc augguuacaL9 6 | A-1806701.1 | 1989 | VPusGfsuaac (Cgn)auguaa CfaUfgcaags asg | CUCUUGCAUGUUACAUGGUUACC | 3300 |
| AD-957775.1 | A-1804748.1 | 1856 | ususgca(Uhd) GfuUfAfCfa ugguuaccaL9 6 | A-1806702.1 | 1990 | VPusGfsguaa (Cgn)caugua AfcAfugcaas gsa | UCUUGCAUGUUACAUGGUUACCA | 3301 |
| AD-957776.1 | A-1804749.1 | 1857 | usgscau(Ghd) UfuAfCfAfu gguuaccaaL9 6 | A-1806703.1 | 1991 | VPusUfsggua (Agn)ccaugu AfaCfaugcas asg | CUUGCAUGUUACAUGGUUACCAC | 3302 |
| AD-957777.1 | A-1804750.1 | 1858 | gscsaug(Uhd) UfaCfAfUfg guuaccacaL9 6 | A-1806704.1 | 1992 | VPusGfsugg u(Agn)accau gUfaAfcaugc sasa | UUGCAUGUUACAUGGUUACCACA | 3303 |
| AD-957808.1 | A-1804819.1 | 1859 | asasaag(Chd) AfuAfAfCfu ucuaaaggaL9 6 | A-1806735.1 | 1993 | VPusCfscuuu (Agn)gaaguu AfuGfcuuuus usa | UAAAAAGCAUAACUUCUAAAGGA | 3304 |
| AD-957809.1 | A-1804821.1 | 1860 | asasage(Ahd) UfaAfCfUfuc uaaaggaaL96 | A-1806736.1 | 1994 | VPusUfsccuu (Tgn)agaagu UfaUfgcuuus usu | AAAAAGCAUAACUUCUAAAGGAA | 3305 |
| AD-957810.1 | A-1804823.1 | 1861 | asasgca(Uhd) AfaCfUfUfcu aaaggaaaL96 | A-1806737.1 | 1995 | VPusUfsuccu (Tgn)uagaag UfuAfugcuus usu | AAAAGCAUAACUUCUAAAGGAAG | 3306 |
| AD-957811.1 | A-1804752.1 | 1862 | asgscau(Ahd) AfcUfUfCfua aaggaagaL96 | A-1806738.1 | 1996 | VPusCfsuucc (Tgn)uuagaa GfuUfaugcus usu | AAAGCAUAACUUCUAAAGGAAGC | 3307 |
| AD-957819.1 | A-1804839.1 | 1863 | ususcua(Ahd) AfgGfAfAfg cagaauagaL9 6 | A-1806746.1 | 1997 | VPusCfsuauu (Cgn)ugcuuc CfuUfuagaas gsu | ACUUCUAAAGGAAGCAGAAUAGC | 3308 |
| AD-957820.1 | A-1804841.1 | 1864 | uscsuaa(Ahd) GfgAfAfGfc agaauagcaL9 6 | A-1806747.1 | 1998 | VPusGfscuau (Tgn)cugcuu CfcUfuuagas asg | CUUCUAAAGGAAGCAGAAUAGCU | 3309 |
| AD-957821.1 | A-1804843.1 | 1865 | csusaaa(Ghd) GfaAfGfCfag aauagcuaL96 | A-1806748.1 | 1999 | VPusAfsgcua (Tgn)ucugcu UfcCfuuuags asa | UUCUAAAGGAAGCAGAAUAGCUC | 3310 |
| AD-957862.1 | A-1804925.1 | 1866 | asasgua(Ahd) GfaUfGfCfau uuacuacaL96 | A-1806789.1 | 2000 | VPusGfsuagu (Agn)aaugca UfcUfuacuus asu | AUAAGUAAGAUGCAUUUACUACA | 3311 |
| AD-957883.1 | A-1804970.1 | 1867 | gsusugg(Chd )UfuCfUfAfa ugcuucagaL9 6 | A-1806810.1 | 2001 | VPusCfsugaa (Ggn)cauuag AfaGfccaacs usg | CAGUUGGCUUCUAAUGCUUCAGA | 3312 |
| AD-957887.1 | A-1804953.1 | 1868 | gscsuuc(Uhd) AfaUfGfCfu ucagauagaL9 6 | A-1806814.1 | 2002 | VPusCfsuauc (Tgn)gaagca UfuAfgaagcs csa | UGGCUUCUAAUGCUUCAGAUAGA | 3313 |
| AD-957889.1 | A-1804954.1 | 1869 | ususcua(Ahd) UfgCfUfUfca gauagaaaL96 | A-1806816.1 | 2003 | VPusUfsucua (Tgn)cugaag CfaUfuagaas gsc | GCUUCUAAUGCUUCAGAUAGAAU | 3314 |
| AD-957890.1 | A-1804980.1 | 1870 | uscsuaa(Uhd) GfcUfUfCfag auagaauaL96 | A-1806817.1 | 2004 | VPusAfsuucu (Agn)ucugaa GfcAfuuagas asg | CUUCUAAUGCUUCAGAUAGAAUA | 3315 |
| AD-957894.1 | A-1804988.1 | 1871 | asusgcu(Uhd) CfaGfAfUfag aauacagaL96 | A-1806821.1 | 2005 | VPusCfsugua (Tgn)ucuauc UfgAfagcaus usa | UAAUGCUUCAGAUAGAAUACAGU | 3316 |
| AD-957895.1 | A-1804990.1 | 1872 | usgscuu(Chd) AfgAfUfAfg aauacaguaL9 6 | A-1806822.1 | 2006 | VPusAfscugu (Agn)uucuau CfuGfaagcas usu | AAUGCUUCAGAUAGAAUACAGUU | 3317 |
| AD-957897.1 | A-1804994.1 | 1873 | csusuca(Ghd) AfuAfGfAfa uacaguugaL9 6 | A-1806824.1 | 2007 | VPusCfsaacu (Ggn)uauucu AfuCfugaags csa | UGCUUCAGAUAGAAUACAGUUGG | 3318 |
| AD-957898.1 | A-1804955.1 | 1874 | ususcag(Ahd) UfaGfAfAfu acaguuggaL9 6 | A-1806825.1 | 2008 | VPusCfscaac (Tgn)guauuc UfaUfcugaas gsc | GCUUCAGAUAGAAUACAGUUGGG | 3319 |

TABLE 4B

Exemplary Human MYOC siRNA Unmodified Single Strands and Duplex Sequences

| Duplex Name | Sense Sequence Name | SEQ ID NO: (Sense) | Sense Sequence (5′-3′) | Range | SEQ ID NO: (Antisense) | Antisense Sequence Name | Antisense Sequence | mRNA Target Range |
|---|---|---|---|---|---|---|---|---|
| AD-956571.1 | A-1802311.1 | 2009 | CGAGACAAGUCAGUUCUGGAA | 516-536 | 2143 | A-1805498.1 | UUCCAGAACUGACUUGUCUCGGA | 514-536 |
| AD-956690.1 | A-1802623.1 | 2010 | GGCUCCAGAGAAGUUUCUACA | 669-689 | 2144 | A-1805617.1 | UGUAGAAACUUCUCUGGAGCCUG | 667-689 |
| AD-956709.1 | A-1802661.1 | 2011 | CGUGGAAUUUGGACACUUUGA | 688-708 | 2145 | A-1805636.1 | UCAAAGTGUCCAAAUUCCACGUA | 686-708 |
| AD-956710.1 | A-1802663.1 | 2012 | GUGGAAUUUGGACACUUUGGA | 689-709 | 2146 | A-1805637.1 | UCCAAAGUGUCCAAAUUCCACGU | 687-709 |
| AD-956732.1 | A-1802705.1 | 2013 | UUCCAGGAACUGAAGUCCGAA | 711-731 | 2147 | A-1805659.1 | UUCGGACUUCAGUUCCUGGAAGG | 709-731 |
| AD-956741.1 | A-1802726.1 | 2014 | CUGAAGUCCGAGCUAACUGAA | 720-740 | 2148 | A-1805668.1 | UUCAGUTAGCUCGGACUUCAGUU | 718-740 |
| AD-956744.1 | A-1802732.1 | 2015 | AAGUCCGAGCUAACUGAAGUA | 723-743 | 2149 | A-1805671.1 | UACUUCAGUUAGCUCGGACUUCA | 721-743 |
| AD-956745.1 | A-1802734.1 | 2016 | AGUCCGAGCUAACUGAAGUUA | 724-744 | 2150 | A-1805672.1 | UAACUUCAGUUAGCUCGGACUUC | 722-744 |
| AD-956746.1 | A-1802713.1 | 2017 | GUCCGAGCUAACUGAAGUUCA | 725-745 | 2151 | A-1805673.1 | UGAACUTCAGUUAGCUCGGACUU | 723-745 |
| AD-956747.1 | A-1802714.1 | 2018 | UCCGAGCUAACUGAAGUUCCA | 726-746 | 2152 | A-1805674.1 | UGGAACTUCAGUUAGCUCGGACU | 724-746 |
| AD-956748.1 | A-1802736.1 | 2019 | CCGAGCUAACUGAAGUUCCUA | 727-747 | 2153 | A-1805675.1 | UAGGAACUUCAGUUAGCUCGGAC | 725-747 |
| AD-956749.1 | A-1802738.1 | 2020 | CGAGCUAACUGAAGUUCCUGA | 728-748 | 2154 | A-1805676.1 | UCAGGAACUUCAGUUAGCUCGGA | 726-748 |
| AD-956760.1 | A-1802760.1 | 2021 | AAGUUCCUGCUUCCCGAAUUA | 739-759 | 2155 | A-1805687.1 | UAAUUCGGGAAGCAGGAACUUCA | 737-759 |
| AD-956761.1 | A-1802762.1 | 2022 | AGUUCCUGCUUCCCGAAUUUA | 740-760 | 2156 | A-1805688.1 | UAAAUUCGGGAAGCAGGAACUUC | 738-760 |
| AD-956762.1 | A-1802764.1 | 2023 | GUUCCUGCUUCCCGAAUUUUA | 741-761 | 2157 | A-1805689.1 | UAAAAUTCGGGAAGCAGGAACUU | 739-761 |
| AD-956763.1 | A-1802715.1 | 2024 | UUCCUGCUUCCCGAAUUUUGA | 742-762 | 2158 | A-1805690.1 | UCAAAATUCGGGAAGCAGGAACU | 740-762 |
| AD-956764.1 | A-1802766.1 | 2025 | UCCUGCUUCCCGAAUUUUGAA | 743-763 | 2159 | A-1805691.1 | UUCAAAAUUCGGGAAGCAGGAAC | 741-763 |
| AD-956765.1 | A-1802768.1 | 2026 | CCUGCUUCCCGAAUUUUGAAA | 744-764 | 2160 | A-1805692.1 | UUUCAAAAUUCGGGAAGCAGGAA | 742-764 |
| AD-956766.1 | A-1802770.1 | 2027 | CUGCUUCCCGAAUUUUGAAGA | 745-765 | 2161 | A-1805693.1 | UCUUCAAAAUUCGGGAAGCAGGA | 743-765 |
| AD-956769.1 | A-1802776.1 | 2028 | CUUCCCGAAUUUUGAAGGAGA | 748-768 | 2162 | A-1805696.1 | UCUCCUTCAAAAUUCGGGAAGCA | 746-768 |
| AD-956827.1 | A-1802818.1 | 2029 | CGGAUGUGGAGAACUAGUUUA | 806-826 | 2163 | A-1805754.1 | UAAACUAGUUCUCCACAUCCGGU | 804-826 |
| AD-956828.1 | A-1802819.1 | 2030 | GGAUGUGGAGAACUAGUUUGA | 807-827 | 2164 | A-1805755.1 | UCAAACTAGUUCUCCACAUCCGG | 805-827 |
| AD-956831.1 | A-1802896.1 | 2031 | UGUGGAGAACUAGUUUGGGUA | 810-830 | 2165 | A-1805758.1 | UACCCAAACUAGUUCUCCACAUC | 808-830 |
| AD-956872.1 | A-1802979.1 | 2032 | AACAGCAGAAACAAUUACUGA | 851-871 | 2166 | A-1805799.1 | UCAGUAAUUGUUUCUGCUGUUCU | 849-871 |
| AD-956873.1 | A-1802981.1 | 2033 | ACAGCAGAAACAAUUACUGGA | 852-872 | 2167 | A-1805800.1 | UCCAGUAAUUGUUUCUGCUGUUC | 850-872 |
| AD-956874.1 | A-1802983.1 | 2034 | CAGCAGAAACAAUUACUGGCA | 853-873 | 2168 | A-1805801.1 | UGCCAGTAAUUGUUUCUGCUGUU | 851-873 |
| AD-956877.1 | A-1802920.1 | 2035 | CAGAAACAAUUACUGGCAAGA | 856-876 | 2169 | A-1805804.1 | UCUUGCCAGUAAUUGUUUCUGCU | 854-876 |
| AD-956880.1 | A-1802993.1 | 2036 | AAACAAUUACUGGCAAGUAUA | 859-879 | 2170 | A-1805807.1 | UAUACUTGCCAGUAAUUGUUUCU | 857-879 |
| AD-956881.1 | A-1802995.1 | 2037 | AACAAUUACUGGCAAGUAUGA | 860-880 | 2171 | A-1805808.1 | UCAUACTUGCCAGUAAUUGUUUC | 858-880 |
| AD-956887.1 | A-1803007.1 | 2038 | UACUGGCAAGUAUGGUGUGUA | 866-886 | 2172 | A-1805814.1 | UACACACCAUACUUGCCAGUAAU | 864-886 |
| AD-956947.1 | A-1803121.1 | 2039 | UCCGCCAGGUUUUUGAGUAUA | 961-981 | 2173 | A-1805874.1 | UAUACUCAAAAACCUGGCGGACA | 959-981 |
| AD-956949.1 | A-1803123.1 | 2040 | CGCCAGGUUUUUGAGUAUGAA | 963-983 | 2174 | A-1805876.1 | UUCAUACUCAAAAACCUGGCGGA | 961-983 |
| AD-956958.1 | A-1803152.1 | 2041 | UUUGAGUAUGACCUCAUCAGA | 972-992 | 2175 | A-1805885.1 | UCUGAUGAGGUCAUACUCAAAAA | 970-992 |
| AD-956967.1 | A-1803124.1 | 2042 | GACCUCAUCAGCCAGUUUAUA | 981-1001 | 2176 | A-1805894.1 | UAUAAACUGGCUGAUGAGGUCAU | 979-1001 |
| AD-956968.1 | A-1803170.1 | 2043 | ACCUCAUCAGCCAGUUUAUGA | 982-1002 | 2177 | A-1805895.1 | UCAUAAACUGGCUGAUGAGGUCA | 980-1002 |
| AD-956992.1 | A-1803125.1 | 2044 | GCUACCCUUCUAAGGUUCACA | 1006-1026 | 2178 | A-1805919.1 | UGUGAACCUUAGAAGGGUAGCCC | 1004-1026 |
| AD-956998.1 | A-1803220.1 | 2045 | CUUCUAAGGUUCACAUACUGA | 1012-1032 | 2179 | A-1805925.1 | UCAGUATGUGAACCUUAGAAGGG | 1010-1032 |
| AD-956999.1 | A-1803222.1 | 2046 | UUCUAAGGUUCACAUACUGCA | 1013-1033 | 2180 | A-1805926.1 | UGCAGUAUGUGAACCUUAGAAGG | 1011-1033 |
| AD-957000.1 | A-1803224.1 | 2047 | UCUAAGGUUCACAUACUGCCA | 1014-1034 | 2181 | A-1805927.1 | UGGCAGTAUGUGAACCUUAGAAG | 1012-1034 |
| AD-957063.1 | A-1803331.1 | 2048 | GAGUCCAGAACUGUCAUAAGA | 1095-1115 | 2182 | A-1805990.1 | UCUUAUGACAGUUCUGGACUCAG | 1093-1115 |
| AD-957064.1 | A-1803350.1 | 2049 | AGUCCAGAACUGUCAUAAGAA | 1096-1116 | 2183 | A-1805991.1 | UUCUUATGACAGUUCUGGACUCA | 1094-1116 |
| AD-957065.1 | A-1803352.1 | 2050 | GUCCAGAACUGUCAUAAGAUA | 1097-1117 | 2184 | A-1805992.1 | UAUCUUAUGACAGUUCUGGACUC | 1095-1117 |
| AD-957068.1 | A-1803358.1 | 2051 | CAGAACUGUCAUAAGAUAUGA | 1100-1120 | 2185 | A-1805995.1 | UCAUAUCUUAUGACAGUUCUGGA | 1098-1120 |
| AD-957069.1 | A-1803360.1 | 2052 | AGAACUGUCAUAAGAUAUGAA | 1101-1121 | 2186 | A-1805996.1 | UUCAUATCUUAUGACAGUUCUGG | 1099-1121 |
| AD-957070.1 | A-1803362.1 | 2053 | GAACUGUCAUAAGAUAUGAGA | 1102-1122 | 2187 | A-1805997.1 | UCUCAUAUCUUAUGACAGUUCUG | 1100-1122 |
| AD-957071.1 | A-1803364.1 | 2054 | AACUGUCAUAAGAUAUGAGCA | 1103-1123 | 2188 | A-1805998.1 | UGCUCATAUCUUAUGACAGUUCU | 1101-1123 |
| AD-957073.1 | A-1803368.1 | 2055 | CUGUCAUAAGAUAUGAGCUGA | 1105-1125 | 2189 | A-1806000.1 | UCAGCUCAUAUCUUAUGACAGUU | 1103-1125 |
| AD-957079.1 | A-1803380.1 | 2056 | UAAGAUAUGAGCUGAAUACCA | 1111-1131 | 2190 | A-1806006.1 | UGGUAUTCAGCUCAUAUCUUAUG | 1109-1131 |
| AD-957081.1 | A-1803384.1 | 2057 | AGAUAUGAGCUGAAUACCGAA | 1113-1133 | 2191 | A-1806008.1 | UUCGGUAUUCAGCUCAUAUCUUA | 1111-1133 |
| AD-957083.1 | A-1803388.1 | 2058 | AUAUGAGCUGAAUACCGAGAA | 1115-1135 | 2192 | A-1806010.1 | UUCUCGGUAUUCAGCUCAUAUCU | 1113-1135 |
| AD-957141.1 | A-1803435.1 | 2059 | CACGGACAGUUCCCGUAUUCA | 1173-1193 | 2193 | A-1806068.1 | UGAAUACGGGAACUGUCCGUGGU | 1171-1193 |
| AD-957142.1 | A-1803436.1 | 2060 | ACGGACAGUUCCCGUAUUCUA | 1174-1194 | 2194 | A-1806069.1 | UAGAAUACGGGAACUGUCCGUGG | 1172-1194 |
| AD-957144.1 | A-1803505.1 | 2061 | GGACAGUUCCCGUAUUCUUGA | 1176-1196 | 2195 | A-1806071.1 | UCAAGAAUACGGGAACUGUCCGU | 1174-1196 |
| AD-957368.1 | A-1803953.1 | 2062 | UACCGUCAACUUUGCUUAUGA | 1418-1438 | 2196 | A-1806295.1 | UCAUAAGCAAAGUUGACGGUAGC | 1416-1438 |
| AD-957369.1 | A-1803955.1 | 2063 | ACCGUCAACUUUGCUUAUGAA | 1419-1439 | 2197 | A-1806296.1 | UUCAUAAGCAAAGUUGACGGUAG | 1417-1439 |
| AD-957370.1 | A-1803957.1 | 2064 | CCGUCAACUUUGCUUAUGACA | 1420-1440 | 2198 | A-1806297.1 | UGUCAUAAGCAAAGUUGACGGUA | 1418-1440 |
| AD-957371.1 | A-1803959.1 | 2065 | CGUCAACUUUGCUUAUGACAA | 1421-1441 | 2199 | A-1806298.1 | UUGUCATAAGCAAAGUUGACGGU | 1419-1441 |
| AD-957439.1 | A-1804089.1 | 2066 | AUAAGUACAGCAGCAUGAUUA | 1489-1509 | 2200 | A-1806366.1 | UAAUCATGCUGCUGUACUUAUAG | 1487-1509 |
| AD-957440.1 | A-1804091.1 | 2067 | UAAGUACAGCAGCAUGAUUGA | 1490-1510 | 2201 | A-1806367.1 | UCAAUCAUGCUGCUGUACUUAUA | 1488-1510 |
| AD-957443.1 | A-1804097.1 | 2068 | GUACAGCAGCAUGAUUGACUA | 1493-1513 | 2202 | A-1806370.1 | UAGUCAAUCAUGCUGCUGUACUU | 1491-1513 |
| AD-957465.1 | A-1804141.1 | 2069 | UUUGCCUGGGACAACUUGAAA | 1536-1556 | 2203 | A-1806392.1 | UUUCAAGUUGUCCCAGGCAAAGA | 1534-1556 |
| AD-957479.1 | A-1804144.1 | 2070 | CUUGAACAUGGUCACUUAUGA | 1550-1570 | 2204 | A-1806406.1 | UCAUAAGUGACCAUGUUCAAGUU | 1548-1570 |
| AD-957480.1 | A-1804145.1 | 2071 | UUGAACAUGGUCACUUAUGAA | 1551-1571 | 2205 | A-1806407.1 | UUCAUAAGUGACCAUGUUCAAGU | 1549-1571 |
| AD-957481.1 | A-1804170.1 | 2072 | UGAACAUGGUCACUUAUGACA | 1552-1572 | 2206 | A-1806408.1 | UGUCAUAAGUGACCAUGUUCAAG | 1550-1572 |
| AD-957482.1 | A-1804172.1 | 2073 | GAACAUGGUCACUUAUGACAA | 1553-1573 | 2207 | A-1806409.1 | UUGUCATAAGUGACCAUGUUCAA | 1551-1573 |
| AD-957487.1 | A-1804182.1 | 2074 | UGGUCACUUAUGACAUCAAGA | 1558-1578 | 2208 | A-1806414.1 | UCUUGATGUCAUAAGUGACCAUG | 1556-1578 |
| AD-957488.1 | A-1804184.1 | 2075 | GGUCACUUAUGACAUCAAGCA | 1559-1579 | 2209 | A-1806415.1 | UGCUUGAUGUCAUAAGUGACCAU | 1557-1579 |
| AD-957489.1 | A-1804186.1 | 2076 | GUCACUUAUGACAUCAAGCUA | 1560-1580 | 2210 | A-1806416.1 | UAGCUUGAUGUCAUAAGUGACCA | 1558-1580 |
| AD-957490.1 | A-1804188.1 | 2077 | UCACUUAUGACAUCAAGCUCA | 1561-1581 | 2211 | A-1806417.1 | UGAGCUTGAUGUCAUAAGUGACC | 1559-1581 |
| AD-957500.1 | A-1804208.1 | 2078 | CAUCAAGCUCUCCAAGAUGUA | 1571-1591 | 2212 | A-1806427.1 | UACAUCTUGGAGAGCUUGAUGUC | 1569-1591 |
| AD-957506.1 | A-1804220.1 | 2079 | GCUCUCCAAGAUGUGAAAAGA | 1577-1597 | 2213 | A-1806433.1 | UCUUUUCACAUCUUGGAGAGCUU | 1575-1597 |
| AD-957508.1 | A-1804224.1 | 2080 | UCUCCAAGAUGUGAAAAGCCA | 1579-1599 | 2214 | A-1806435.1 | UGGCUUTUCACAUCUUGGAGAGC | 1577-1599 |
| AD-957650.1 | A-1804508.1 | 2081 | UUCAGGAAUUGUAGUCUGAGA | 1752-1772 | 2215 | A-1806577.1 | UCUCAGACUACAAUUCCUGAAUA | 1750-1772 |
| AD-957685.1 | A-1804578.1 | 2082 | UAUCUUCUGUCAGCAUUUAUA | 1804-1824 | 2216 | A-1806612.1 | UAUAAATGCUGACAGAAGAUAAA | 1802-1824 |
| AD-957686.1 | A-1804580.1 | 2083 | AUCUUCUGUCAGCAUUUAUGA | 1805-1825 | 2217 | A-1806613.1 | UCAUAAAUGCUGACAGAAGAUAA | 1803-1825 |
| AD-957687.1 | A-1804582.1 | 2084 | UCUUCUGUCAGCAUUUAUGGA | 1806-1826 | 2218 | A-1806614.1 | UCCAUAAAUGCUGACAGAAGAUA | 1804-1826 |
| AD-957688.1 | A-1804584.1 | 2085 | CUUCUGUCAGCAUUUAUGGGA | 1807-1827 | 2219 | A-1806615.1 | UCCCAUAAAUGCUGACAGAAGAU | 1805-1827 |
| AD-957690.1 | A-1804588.1 | 2086 | UCUGUCAGCAUUUAUGGGAUA | 1809-1829 | 2220 | A-1806617.1 | UAUCCCAUAAAUGCUGACAGAAG | 1807-1829 |
| AD-957691.1 | A-1804590.1 | 2087 | CUGUCAGCAUUUAUGGGAUGA | 1810-1830 | 2221 | A-1806618.1 | UCAUCCCAUAAAUGCUGACAGAA | 1808-1830 |
| AD-957694.1 | A-1804596.1 | 2088 | UCAGCAUUUAUGGGAUGUUUA | 1813-1833 | 2222 | A-1806621.1 | UAAACATCCCAUAAAUGCUGACA | 1811-1833 |
| AD-957695.1 | A-1804598.1 | 2089 | CAGCAUUUAUGGGAUGUUUAA | 1814-1834 | 2223 | A-1806622.1 | UUAAACAUCCCAUAAAUGCUGAC | 1812-1834 |
| AD-957696.1 | A-1804600.1 | 2090 | AGCAUUUAUGGGAUGUUUAAA | 1815-1835 | 2224 | A-1806623.1 | UUUAAACAUCCCAUAAAUGCUGA | 1813-1835 |
| AD-957698.1 | A-1804604.1 | 2091 | CAUUUAUGGGAUGUUUAAUGA | 1817-1837 | 2225 | A-1806625.1 | UCAUUAAACAUCCCAUAAAUGCU | 1815-1837 |
| AD-957699.1 | A-1804606.1 | 2092 | AUUUAUGGGAUGUUUAAUGAA | 1818-1838 | 2226 | A-1806626.1 | UUCAUUAAACAUCCCAUAAAUGC | 1816-1838 |
| AD-957706.1 | A-1804620.1 | 2093 | GGAUGUUUAAUGACAUAGUUA | 1825-1845 | 2227 | A-1806633.1 | UAACUATGUCAUUAAACAUCCCA | 1823-1845 |
| AD-957707.1 | A-1804622.1 | 2094 | GAUGUUUAAUGACAUAGUUCA | 1826-1846 | 2228 | A-1806634.1 | UGAACUAUGUCAUUAAACAUCCC | 1824-1846 |
| AD-957708.1 | A-1804624.1 | 2095 | AUGUUUAAUGACAUAGUUCAA | 1827-1847 | 2229 | A-1806635.1 | UUGAACTAUGUCAUUAAACAUCC | 1825-1847 |
| AD-957710.1 | A-1804628.1 | 2096 | GUUUAAUGACAUAGUUCAAGA | 1829-1849 | 2230 | A-1806637.1 | UCUUGAACUAUGUCAUUAAACAU | 1827-1849 |
| AD-957711.1 | A-1804630.1 | 2097 | UUUAAUGACAUAGUUCAAGUA | 1830-1850 | 2231 | A-1806638.1 | UACUUGAACUAUGUCAUUAAACA | 1828-1850 |
| AD-957716.1 | A-1804640.1 | 2098 | UGACAUAGUUCAAGUUUUCUA | 1835-1855 | 2232 | A-1806643.1 | UAGAAAACUUGAACUAUGUCAUU | 1833-1855 |
| AD-957717.1 | A-1804642.1 | 2099 | GACAUAGUUCAAGUUUUCUUA | 1836-1856 | 2233 | A-1806644.1 | UAAGAAAACUUGAACUAUGUCAU | 1834-1856 |
| AD-957718.1 | A-1804644.1 | 2100 | ACAUAGUUCAAGUUUUCUUGA | 1837-1857 | 2234 | A-1806645.1 | UCAAGAAAACUUGAACUAUGUCA | 1835-1857 |
| AD-957719.1 | A-1804647.1 | 2101 | CAUAGUUCAAGUUUUCUUGUA | 1838-1858 | 2235 | A-1806646.1 | UACAAGAAAACUUGAACUAUGUC | 1836-1858 |
| AD-957720.1 | A-1804649.1 | 2102 | AUAGUUCAAGUUUUCUUGUGA | 1839-1859 | 2236 | A-1806647.1 | UCACAAGAAAACUUGAACUAUGU | 1837-1859 |
| AD-957721.1 | A-1804651.1 | 2103 | UAGUUCAAGUUUUCUUGUGAA | 1840-1860 | 2237 | A-1806648.1 | UUCACAAGAAAACUUGAACUAUG | 1838-1860 |
| AD-957722.1 | A-1804653.1 | 2104 | AGUUCAAGUUUUCUUGUGAUA | 1841-1861 | 2238 | A-1806649.1 | UAUCACAAGAAAACUUGAACUAU | 1839-1861 |
| AD-957723.1 | A-1804655.1 | 2105 | GUUCAAGUUUUCUUGUGAUUA | 1842-1862 | 2239 | A-1806650.1 | UAAUCACAAGAAAACUUGAACUA | 1840-1862 |
| AD-957725.1 | A-1804659.1 | 2106 | UCAAGUUUUCUUGUGAUUUGA | 1844-1864 | 2240 | A-1806652.1 | UCAAAUCACAAGAAAACUUGAAC | 1842-1864 |
| AD-957748.1 | A-1804705.1 | 2107 | AUAGUUUCUUCCUGAAAACCA | 1885-1905 | 2241 | A-1806675.1 | UGGUUUTCAGGAAGAAACUAUUA | 1883-1905 |
| AD-957753.1 | A-1804715.1 | 2108 | UUCUUCCUGAAAACCAUUGCA | 1890-1910 | 2242 | A-1806680.1 | UGCAAUGGUUUUCAGGAAGAAAC | 1888-1910 |
| AD-957754.1 | A-1804646.1 | 2109 | UCUUCCUGAAAACCAUUGCUA | 1891-1911 | 2243 | A-1806681.1 | UAGCAATGGUUUUCAGGAAGAAA | 1889-1911 |
| AD-957756.1 | A-1804719.1 | 2110 | UUCCUGAAAACCAUUGCUCUA | 1893-1913 | 2244 | A-1806683.1 | UAGAGCAAUGGUUUUCAGGAAGA | 1891-1913 |
| AD-957761.1 | A-1804729.1 | 2111 | GAAAACCAUUGCUCUUGCAUA | 1898-1918 | 2245 | A-1806688.1 | UAUGCAAGAGCAAUGGUUUUCAG | 1896-1918 |
| AD-957762.1 | A-1804731.1 | 2112 | AAAACCAUUGCUCUUGCAUGA | 1899-1919 | 2246 | A-1806689.1 | UCAUGCAAGAGCAAUGGUUUUCA | 1897-1919 |
| AD-957764.1 | A-1804735.1 | 2113 | AACCAUUGCUCUUGCAUGUUA | 1901-1921 | 2247 | A-1806691.1 | UAACAUGCAAGAGCAAUGGUUUU | 1899-1921 |
| AD-957765.1 | A-1804737.1 | 2114 | ACCAUUGCUCUUGCAUGUUAA | 1902-1922 | 2248 | A-1806692.1 | UUAACATGCAAGAGCAAUGGUUU | 1900-1922 |
| AD-957766.1 | A-1804739.1 | 2115 | CCAUUGCUCUUGCAUGUUACA | 1903-1923 | 2249 | A-1806693.1 | UGUAACAUGCAAGAGCAAUGGUU | 1901-1923 |
| AD-957767.1 | A-1804741.1 | 2116 | CAUUGCUCUUGCAUGUUACAA | 1904-1924 | 2250 | A-1806694.1 | UUGUAACAUGCAAGAGCAAUGGU | 1902-1924 |
| AD-957768.1 | A-1804743.1 | 2117 | AUUGCUCUUGCAUGUUACAUA | 1905-1925 | 2251 | A-1806695.1 | UAUGUAACAUGCAAGAGCAAUGG | 1903-1925 |
| AD-957769.1 | A-1804745.1 | 2118 | UUGCUCUUGCAUGUUACAUGA | 1906-1926 | 2252 | A-1806696.1 | UCAUGUAACAUGCAAGAGCAAUG | 1904-1926 |
| AD-957770.1 | A-1804753.1 | 2119 | UGCUCUUGCAUGUUACAUGGA | 1907-1927 | 2253 | A-1806697.1 | UCCAUGTAACAUGCAAGAGCAAU | 1905-1927 |
| AD-957771.1 | A-1804755.1 | 2120 | GCUCUUGCAUGUUACAUGGUA | 1908-1928 | 2254 | A-1806698.1 | UACCAUGUAACAUGCAAGAGCAA | 1906-1928 |
| AD-957772.1 | A-1804757.1 | 2121 | CUCUUGCAUGUUACAUGGUUA | 1909-1929 | 2255 | A-1806699.1 | UAACCATGUAACAUGCAAGAGCA | 1907-1929 |
| AD-957773.1 | A-1804759.1 | 2122 | UCUUGCAUGUUACAUGGUUAA | 1910-1930 | 2256 | A-1806700.1 | UUAACCAUGUAACAUGCAAGAGC | 1908-1930 |
| AD-957774.1 | A-1804747.1 | 2123 | CUUGCAUGUUACAUGGUUACA | 1911-1931 | 2257 | A-1806701.1 | UGUAACCAUGUAACAUGCAAGAG | 1909-1931 |
| AD-957775.1 | A-1804748.1 | 2124 | UUGCAUGUUACAUGGUUACCA | 1912-1932 | 2258 | A-1806702.1 | UGGUAACCAUGUAACAUGCAAGA | 1910-1932 |
| AD-957776.1 | A-1804749.1 | 2125 | UGCAUGUUACAUGGUUACCAA | 1913-1933 | 2259 | A-1806703.1 | UUGGUAACCAUGUAACAUGCAAG | 1911-1933 |
| AD-957777.1 | A-1804750.1 | 2126 | GCAUGUUACAUGGUUACCACA | 1914-1934 | 2260 | A-1806704.1 | UGUGGUAACCAUGUAACAUGCAA | 1912-1934 |
| AD-957808.1 | A-1804819.1 | 2127 | AAAAGCAUAACUUCUAAAGGA | 1945-1965 | 2261 | A-1806735.1 | UCCUUUAGAAGUUAUGCUUUUUA | 1943-1965 |
| AD-957809.1 | A-1804821.1 | 2128 | AAAGCAUAACUUCUAAAGGAA | 1946-1966 | 2262 | A-1806736.1 | UUCCUUTAGAAGUUAUGCUUUUU | 1944-1966 |
| AD-957810.1 | A-1804823.1 | 2129 | AAGCAUAACUUCUAAAGGAAA | 1947-1967 | 2263 | A-1806737.1 | UUUCCUTUAGAAGUUAUGCUUUU | 1945-1967 |
| AD-957811.1 | A-1804752.1 | 2130 | AGCAUAACUUCUAAAGGAAGA | 1948-1968 | 2264 | A-1806738.1 | UCUUCCTUUAGAAGUUAUGCUUU | 1946-1968 |
| AD-957819.1 | A-1804839.1 | 2131 | UUCUAAAGGAAGCAGAAUAGA | 1956-1976 | 2265 | A-1806746.1 | UCUAUUCUGCUUCCUUUAGAAGU | 1954-1976 |
| AD-957820.1 | A-1804841.1 | 2132 | UCUAAAGGAAGCAGAAUAGCA | 1957-1977 | 2266 | A-1806747.1 | UGCUAUTCUGCUUCCUUUAGAAG | 1955-1977 |
| AD-957821.1 | A-1804843.1 | 2133 | CUAAAGGAAGCAGAAUAGCUA | 1958-1978 | 2267 | A-1806748.1 | UAGCUATUCUGCUUCCUUUAGAA | 1956-1978 |
| AD-957862.1 | A-1804925.1 | 2134 | AAGUAAGAUGCAUUUACUACA | 1999-2019 | 2268 | A-1806789.1 | UGUAGUAAAUGCAUCUUACUUAU | 1997-2019 |
| AD-957883.1 | A-1804970.1 | 2135 | GUUGGCUUCUAAUGCUUCAGA | 2020-2040 | 2269 | A-1806810.1 | UCUGAAGCAUUAGAAGCCAACUG | 2018-2040 |
| AD-957887.1 | A-1804953.1 | 2136 | GCUUCUAAUGCUUCAGAUAGA | 2024-2044 | 2270 | A-1806814.1 | UCUAUCTGAAGCAUUAGAAGCCA | 2022-2044 |
| AD-957889.1 | A-1804954.1 | 2137 | UUCUAAUGCUUCAGAUAGAAA | 2026-2046 | 2271 | A-1806816.1 | UUUCUATCUGAAGCAUUAGAAGC | 2024-2046 |
| AD-957890.1 | A-1804980.1 | 2138 | UCUAAUGCUUCAGAUAGAAUA | 2027-2047 | 2272 | A-1806817.1 | UAUUCUAUCUGAAGCAUUAGAAG | 2025-2047 |
| AD-957894.1 | A-1804988.1 | 2139 | AUGCUUCAGAUAGAAUACAGA | 2031-2051 | 2273 | A-1806821.1 | UCUGUATUCUAUCUGAAGCAUUA | 2029-2051 |
| AD-957895.1 | A-1804990.1 | 2140 | UGCUUCAGAUAGAAUACAGUA | 2032-2052 | 2274 | A-1806822.1 | UACUGUAUUCUAUCUGAAGCAUU | 2030-2052 |
| AD-957897.1 | A-1804994.1 | 2141 | CUUCAGAUAGAAUACAGUUGA | 2034-2054 | 2275 | A-1806824.1 | UCAACUGUAUUCUAUCUGAAGCA | 2032-2054 |
| AD-957898.1 | A-1804955.1 | 2142 | UUCAGAUAGAAUACAGUUGGA | 2035-2055 | 2276 | A-1806825.1 | UCCAACTGUAUUCUAUCUGAAGC | 2033-2055 |

TABLE 5A

Exemplary Human MYOC siRNA Modified Single Strands and Duplex Sequences.

| Duplex Name | Sense Sequence Name | SEQ ID NO: (Sense) | Sense Sequence (5′-3′) | Antisense Sequence Name | SEQ ID NO: (Antisense) | Antisense Sequence | mRNA Target Sequence | SEQ ID NO: |
|---|---|---|---|---|---|---|---|---|
| AD-957960.1 | A-1806917.1 | 2277 | csasgca(Chd) agdCadGagc uuuccaaL96 | A-1806918.1 | 2395 | VPusdTsggd AadAgcucdT gdCugugcugs asg | CUCAGCACAGCAGAGCUUUCCAG | 3320 |
| AD-957961.1 | A-1806919.1 | 2278 | asgscac(Ahd) gcdAgdAgcu uuccagaL96 | A-1806920.1 | 2396 | VPusdCsugd GadAagcudC udGcugugcus gsa | UCAGCACAGCAGAGCUUUCCAGA | 3321 |
| AD-958008.1 | A-1807013.1 | 2279 | asgsguu(Chd) uudCudGugc acguugaL96 | A-1807014.1 | 2397 | VPusdCsaad CgdTgcacdA gdAagaaccus csa | UGAGGUUCUUCUGUGCACGUUGC | 3322 |
| AD-958009.1 | A-1807015.1 | 2280 | gsgsuuc(Uhd )ucdTgdTgca cguugcaL96 | A-1807016.1 | 2398 | VPusdGscad AcdGugcadC adGaagaaccs use | GAGGUUCUUCUGUGCACGUUGCU | 3323 |
| AD-958145.1 | A-1807287.1 | 2281 | gscscag(Uhd) ccdCadAuga auccagaL96 | A-1807288.1 | 2399 | VPusdCsugd GadTucaudT gdGgacuggcs csa | UGGCCAGUCCCAAUGAAUCCAGC | 3324 |
| AD-958368.1 | A-1807733.1 | 2282 | uscscga(Ghd) acdAadGuca guucugaL96 | A-1807734.1 | 2400 | VPusdCsagd AadCugacdT udGucucggas gsg | CCUCCGAGACAAGUCAGUUCUGG | 3325 |
| AD-958369.1 | A-1807735.1 | 2283 | cscsgag(Ahd) cadAgdTcag uucuggaL96 | A-1807736.1 | 2401 | VPusdCscad GadAcugadC udTgucucggs asg | CUCCGAGACAAGUCAGUUCUGGA | 3326 |
| AD-958488.1 | A-1807973.1 | 2284 | asgsgcu(Chd) cadGadGaag uuucuaaL96 | A-1807974.1 | 2402 | VPusdTsagd AadAcuucdT cdTggagccus gsg | CCAGGCUCCAGAGAAGUUUCUAC | 3327 |
| AD-958489.1 | A-1807975.1 | 2285 | gsgscuc(Chd) agdAgdAagu uucuacaL96 | A-1807976.1 | 2403 | VPusdGsuad GadAacuudC udCuggagccs usg | CAGGCUCCAGAGAAGUUUCUACG | 3328 |
| AD-958509.1 | A-1808015.1 | 2286 | gsusgga(Ahd )uudTgdGaca cuuuggaL96 | A-1808016.1 | 2404 | VPusdCscad AadGugucdC adAauuccacs gsu | ACGUGGAAUUUGGACACUUUGGC | 3329 |
| AD-958510.1 | A-1808017.1 | 2287 | usgsgaa(Uhd) uudGgdAcac uuuggcaL96 | A-1808018.1 | 2405 | VPusdGsccd AadAgugudC cdAaauuccas csg | CGUGGAAUUUGGACACUUUGGCC | 3330 |
| AD-958511.1 | A-1808019.1 | 2288 | gsgsaau(Uhd) ugdGadCacu uuggccaL96 | A-1808020.1 | 2406 | VPusdGsgcd CadAagugdT cdCaaauuccs asc | GUGGAAUUUGGACACUUUGGCCU | 3331 |
| AD-958512.1 | A-1808021.1 | 2289 | gsasauu(Uhd) ggdAcdAcuu uggccuaL96 | A-1808022.1 | 2407 | VPusdAsggd CcdAaagudG udCcaaauucs csa | UGGAAUUUGGACACUUUGGCCUU | 3332 |
| AD-958518.1 | A-1808033.1 | 2290 | gsgsaca(Chd) uudTgdGccu uccaggaL96 | A-1808034.1 | 2408 | VPusdCscud GgdAaggcdC adAaguguccs asa | UUGGACACUUUGGCCUUCCAGGA | 3333 |
| AD-958532.1 | A-1808061.1 | 2291 | uscscag(Ghd) aadCudGaag uccgagaL96 | A-1808062.1 | 2409 | VPusdCsucd GgdAcuucdA gdTuccuggas asg | CUUCCAGGAACUGAAGUCCGAGC | 3334 |
| AD-958539.1 | A-1808075.1 | 2292 | ascsuga(Ahd) gudCcdGagc uaacugaL96 | A-1808076.1 | 2410 | VPusdCsagd TudAgcucdG gdAcuucagus use | GAACUGAAGUCCGAGCUAACUGA | 3335 |
| AD-958548.1 | A-1808093.1 | 2293 | csgsagc(Uhd) aadCudGaag uuccugaL96 | A-1808094.1 | 2411 | VPusdCsagd GadAcuucdA gdTuagcucgs gsa | UCCGAGCUAACUGAAGUUCCUGC | 3336 |
| AD-958555.1 | A-1808107.1 | 2294 | ascsuga(Ahd) gudTcdCugc uucccgaL96 | A-1808108.1 | 2412 | VPusdCsggd GadAgcagdG adAcuucagus usa | UAACUGAAGUUCCUGCUUCCCGA | 3337 |
| AD-958561.1 | A-1808119.1 | 2295 | gsusucc(Uhd) gcdTudCccga auuuuaL96 | A-1808120.1 | 2413 | VPusdAsaad AudTcgggdA adGcaggaacs usu | AAGUUCCUGCUUCCCGAAUUUUG | 3338 |
| AD-958563.1 | A-1808123.1 | 2296 | uscscug(Chd) uudCcdCgaa uuuugaaL96 | A-1808124.1 | 2414 | VPusdTscad AadAuucgdG gdAagcaggas asc | GUUCCUGCUUCCCGAAUUUUGAA | 3339 |
| AD-958564.1 | A-1808125.1 | 2297 | cscsugc(Uhd) ucdCcdGaau uuugaaaL96 | A-1808126.1 | 2415 | VPusdTsucd AadAauucdG gdGaagcaggs asa | UUCCUGCUUCCCGAAUUUUGAAG | 3340 |
| AD-958565.1 | A-1808127.1 | 2298 | csusgcu(Uhd) ccdCgdAauu uugaagaL96 | A-1808128.1 | 2416 | VPusdCsuud CadAaauudC gdGgaagcags gsa | UCCUGCUUCCCGAAUUUUGAAGG | 3341 |
| AD-958566.1 | A-1808129.1 | 2299 | usgscuu(Chd) ccdGadAuuu ugaaggaL96 | A-1808130.1 | 2417 | VPusdCscud TedAaaaudT cdGggaagcas gsg | CCUGCUUCCCGAAUUUUGAAGGA | 3342 |
| AD-958568.1 | A-1808133.1 | 2300 | csusucc(Chd) gadAudTuug aaggagaL96 | A-1808134.1 | 2418 | VPusdCsucd CudTeaaadA udTcgggaags csa | UGCUUCCCGAAUUUUGAAGGAGA | 3343 |
| AD-958628.1 | A-1808253.1 | 2301 | gsasugu(Ghd )gadGadAcua guuuggaL96 | A-1808254.1 | 2419 | VPusdCscad AadCuagudT cdTccacaucsc sg | CGGAUGUGGAGAACUAGUUUGGG | 3344 |
| AD-958629.1 | A-1808255.1 | 2302 | asusgug(Ghd ) agdAadCuag uuugggaL96 | A-1808256.1 | 2420 | VPusdCsccd AadAcuagdT udCuccacaus CSC | GGAUGUGGAGAACUAGUUUGGGU | 3345 |
| AD-958630.1 | A-1808257.1 | 2303 | usgsugg(Ahd )gadAcdTagu uuggguaL96 | A-1808258.1 | 2421 | VPusdAsccd CadAacuadG udTcuccacas use | GAUGUGGAGAACUAGUUUGGGUA | 3346 |
| AD-958632.1 | A-1808261.1 | 2304 | usgsgag(Ahd )acdTadGuuu ggguagaL96 | A-1808262.1 | 2422 | VPusdCsuad CcdCaaacdT adGuucuccas csa | UGUGGAGAACUAGUUUGGGUAGG | 3347 |
| AD-958633.1 | A-1808263.1 | 2305 | gsgsaga(Ahd) cudAgdTuug gguaggaL96 | A-1808264.1 | 2423 | VPusdCscud AcdCcaaadC udAguucuccs asc | GUGGAGAACUAGUUUGGGUAGGA | 3348 |
| AD-958635.1 | A-1808267.1 | 2306 | asgsaac(Uhd) agdTudTggg uaggagaL96 | A-1808268.1 | 2424 | VPusdCsucd CudAcccadA adCuaguucus csc | GGAGAACUAGUUUGGGUAGGAGA | 3349 |
| AD-958671.1 | A-1808339.1 | 2307 | asascag(Chd) agdAadAcaa uuacugaL96 | A-1808340.1 | 2425 | VPusdCsagd TadAuugudT udCugcuguus csu | AGAACAGCAGAAACAAUUACUGG | 3350 |
| AD-958672.1 | A-1808341.1 | 2308 | ascsagc(Ahd) gadAadCaau uacuggaL96 | A-1808342.1 | 2426 | VPusdCscad GudAauugdT udTcugcugus use | GAACAGCAGAAACAAUUACUGGC | 3351 |
| AD-958680.1 | A-1808357.1 | 2309 | asascaa(Uhd) uadCudGgca aguaugaL96 | A-1808358.1 | 2427 | VPusdCsaud AcdTugccdA gdTaauuguus use | GAAACAAUUACUGGCAAGUAUGG | 3352 |
| AD-958681.1 | A-1808359.1 | 2310 | asesaau(Uhd) acdTgdGcaag uauggaL96 | A-1808360.1 | 2428 | VPusdCscad TadCuugcdC adGuaauugus usu | AAACAAUUACUGGCAAGUAUGGU | 3353 |
| AD-958682.1 | A-1808361.1 | 2311 | csasauu(Ahd) cudGgdCaag uaugguaL96 | A-1808362.1 | 2429 | VPusdAsccd AudAcuugdC cdAguaauugs usu | AACAAUUACUGGCAAGUAUGGUG | 3354 |
| AD-958683.1 | A-1808363.1 | 2312 | asasuua(Chd) ugdGcdAagu auggugaL96 | A-1808364.1 | 2430 | VPusdCsacd CadTacuudG cdCaguaauus gsu | ACAAUUACUGGCAAGUAUGGUGU | 3355 |
| AD-958684.1 | A-1808365.1 | 2313 | asusuac(Uhd) ggdCadAgua ugguguaL96 | A-1808366.1 | 2431 | VPusdAscad CcdAuacudT gdCcaguaaus usg | CAAUUACUGGCAAGUAUGGUGUG | 3356 |
| AD-958685.1 | A-1808367.1 | 2314 | ususacu(Ghd) gcdAadGuau ggugugaL96 | A-1808368.1 | 2432 | VPusdCsacd AcdCauacdT udGccaguaas usu | AAUUACUGGCAAGUAUGGUGUGU | 3357 |
| AD-958695.1 | A-1808387.1 | 2315 | gsusaug(Ghd )ugdTgdTgga ugcgagaL96 | A-1808388.1 | 2433 | VPusdCsucd GcdAuccadC adCaccauacs usu | AAGUAUGGUGUGUGGAUGCGAGA | 3358 |
| AD-958742.1 | A-1808481.1 | 2316 | gsasugu(Chd) cgdCcdAggu uuuugaaL96 | A-1808482.1 | 2434 | VPusdTscad AadAaccudG gdCggacaucs csg | CGGAUGUCCGCCAGGUUUUUGAG | 3359 |
| AD-958757.1 | A-1808511.1 | 2317 | ususuga(Ghd )uadTgdAccu caucagaL96 | A-1808512.1 | 2435 | VPusdCsugd AudGaggudC adTacucaaasa sa | UUUUUGAGUAUGACCUCAUCAGC | 3360 |
| AD-958767.1 | A-1808531.1 | 2318 | ascscuc(Ahd) ucdAgdCcag uuuaugaL96 | A-1808532.1 | 2436 | VPusdCsaud AadAcuggdC udGaugaggus csa | UGACCUCAUCAGCCAGUUUAUGC | 3361 |
| AD-958768.1 | A-1808533.1 | 2319 | cscsuca(Uhd) cadGcdCagu uuaugcaL96 | A-1808534.1 | 2437 | VPusdGscad TadAacugdG cdTgaugaggs use | GACCUCAUCAGCCAGUUUAUGCA | 3362 |
| AD-958770.1 | A-1808537.1 | 2320 | uscsauc(Ahd) gcdCadGuuu augcagaL96 | A-1808538.1 | 2438 | VPusdCsugd CadTaaacdT gdGcugaugas gsg | CCUCAUCAGCCAGUUUAUGCAGG | 3363 |
| AD-958786.1 | A-1808569.1 | 2321 | gscsagg(Ghd) cudAcdCcuu cuaaggaL96 | A-1808570.1 | 2439 | VPusdCscud TadGaaggdG udAgcccugcs asu | AUGCAGGGCUACCCUUCUAAGGU | 3364 |
| AD-958787.1 | A-1808571.1 | 2322 | csasggg(Chd) uadCcdCuuc uaagguaL96 | A-1808572.1 | 2440 | VPusdAsccd TudAgaagdG gdTagcccugs csa | UGCAGGGCUACCCUUCUAAGGUU | 3365 |
| AD-958789.1 | A-1808575.1 | 2323 | gsgsgcu(Ahd )ccdCudTcua agguucaL96 | A-1808576.1 | 2441 | VPusdGsaad CedTuagadA gdGguagcccs usg | CAGGGCUACCCUUCUAAGGUUCA | 3366 |
| AD-958797.1 | A-1808591.1 | 2324 | csusucu(Ahd) agdGudTcaca uacugaL96 | A-1808592.1 | 2442 | VPusdCsagd TadTgugadA edCuuagaags gsg | CCCUUCUAAGGUUCACAUACUGC | 3367 |
| AD-958798.1 | A-1808593.1 | 2325 | ususcua(Ahd) ggdTudCaca uacugcaL96 | A-1808594.1 | 2443 | VPusdGscad GudAugugd AadCcuuaga asgsg | CCUUCUAAGGUUCACAUACUGCC | 3368 |
| AD-958864.1 | A-1808725.1 | 2326 | gsuscca(Ghd) aadCudGuca uaagauaL96 | A-1808726.1 | 2444 | VPusdAsued TudAugacdA gdTucuggacs use | GAGUCCAGAACUGUCAUAAGAUA | 3369 |
| AD-958867.1 | A-1808731.1 | 2327 | csasgaa(Chd) ugdTcdAuaa gauaugaL96 | A-1808732.1 | 2445 | VPusdCsaud AudCuuaudG adCaguucugs gsa | UCCAGAACUGUCAUAAGAUAUGA | 3370 |
| AD-958868.1 | A-1808733.1 | 2328 | asgsaac(Uhd) gudCadTaaga uaugaaL96 | A-1808734.1 | 2446 | VPusdTscad TadTcuuadT gdAcaguucus gsg | CCAGAACUGUCAUAAGAUAUGAG | 3371 |
| AD-958869.1 | A-1808735.1 | 2329 | gsasacu(Ghd) ucdAudAaga uaugagaL96 | A-1808736.1 | 2447 | VPusdCsucd AudAucuud AudGacaguu csusg | CAGAACUGUCAUAAGAUAUGAGC | 3372 |
| AD-958870.1 | A-1808737.1 | 2330 | asascug(Uhd) cadTadAgaua ugagcaL96 | A-1808738.1 | 2448 | VPusdGseud CadTaucudT adTgacaguus csu | AGAACUGUCAUAAGAUAUGAGCU | 3373 |
| AD-958879.1 | A-1808755.1 | 2331 | asasgau(Ahd) ugdAgdCuga auaccgaL96 | A-1808756.1 | 2449 | VPusdCsggd TadTucagdC udCauaucuus asu | AUAAGAUAUGAGCUGAAUACCGA | 3374 |
| AD-958880.1 | A-1808757.1 | 2332 | asgsaua(Uhd) gadGcdTgaa uaccgaaL96 | A-1808758.1 | 2450 | VPusdTscgd GudAuucadG cdTcauaucus usa | UAAGAUAUGAGCUGAAUACCGAG | 3375 |
| AD-958881.1 | A-1808759.1 | 2333 | gsasuau(Ghd) agdCudGaau accgagaL96 | A-1808760.1 | 2451 | VPusdCsucd GgdTauucdA gdCucauaucs usu | AAGAUAUGAGCUGAAUACCGAGA | 3376 |
| AD-958890.1 | A-1808777.1 | 2334 | usgsaau(Ahd) ccdGadGaca gugaagaL96 | A-1808778.1 | 2452 | VPusdCsuud CadCugucdT cdGguauucas gsc | GCUGAAUACCGAGACAGUGAAGG | 3377 |
| AD-958891.1 | A-1808779.1 | 2335 | gsasaua(Chd) cgdAgdAcag ugaaggaL96 | A-1808780.1 | 2453 | VPusdCscud TcdAcugudC udCgguauucs asg | CUGAAUACCGAGACAGUGAAGGC | 3378 |
| AD-958938.1 | A-1808873.1 | 2336 | ascscac(Ghd) gadCadGuuc ccguauaL96 | A-1808874.1 | 2454 | VPusdAsuad CgdGgaacdT gdTccguggus asg | CUACCACGGACAGUUCCCGUAUU | 3379 |
| AD-958942.1 | A-1808881.1 | 2337 | csgsgac(Ahd) gudTcdCcgu auucuuaL96 | A-1808882.1 | 2455 | VPusdAsagd AadTacggdG adAcuguccgs usg | CACGGACAGUUCCCGUAUUCUUG | 3380 |
| AD-958943.1 | A-1808883.1 | 2338 | gsgsaca(Ghd) uudCcdCgua uucuugaL96 | A-1808884.1 | 2456 | VPusdCsaad GadAuacgdG gdAacuguccs gsu | ACGGACAGUUCCCGUAUUCUUGG | 3381 |
| AD-958944.1 | A-1808885.1 | 2339 | gsascag(Uhd) ucdCcdGuau ucuuggaL96 | A-1808886.1 | 2457 | VPusdCscad AgdAauacdG gdGaacugucs csg | CGGACAGUUCCCGUAUUCUUGGG | 3382 |
| AD-958983.1 | A-1808963.1 | 2340 | csasggc(Chd) ucdTgdGguc auuuacaL96 | A-1808964.1 | 2458 | VPusdGsuad AadTgaccdC adGaggccugs csu | AGCAGGCCUCUGGGUCAUUUACA | 3383 |
| AD-958984.1 | A-1808965.1 | 2341 | asgsgcc(Uhd) cudGgdGuca uuuacaaL96 | A-1808966.1 | 2459 | VPusdTsgud AadAugacdC cdAgaggccus gsc | GCAGGCCUCUGGGUCAUUUACAG | 3384 |
| AD-958985.1 | A-1808967.1 | 2342 | gsgsccu(Chd) ugdGgdTcau uuacagaL96 | A-1808968.1 | 2460 | VPusdCsugd TadAaugadC cdCagaggccs usg | CAGGCCUCUGGGUCAUUUACAGC | 3385 |
| AD-959013.1 | A-1809023.1 | 2343 | asgsgcc(Ahd) aadGgdTgcca uugucaL96 | A-1809024.1 | 2461 | VPusdGsacd AadTggcadC cdTuuggccus csa | UGAGGCCAAAGGUGCCAUUGUCC | 3386 |
| AD-959025.1 | A-1809047.1 | 2344 | cscsauu(Ghd) ucdCudCucc aaacugaL96 | A-1809048.1 | 2462 | VPusdCsagd TudTggagdA gdGacaauggs csa | UGCCAUUGUCCUCUCCAAACUGA | 3387 |
| AD-959102.1 | A-1809201.1 | 2345 | gsuscgc(Chd) aadTgdCcuuc aucauaL96 | A-1809202.1 | 2463 | VPusdAsugd AudGaaggdC adTuggcgacs usg | CAGUCGCCAAUGCCUUCAUCAUC | 3388 |
| AD-959167.1 | A-1809331.1 | 2346 | usasccg(Uhd) cadAcdTuug cuuaugaL96 | A-1809332.1 | 2464 | VPusdCsaud AadGcaaadG udTgacgguas gsc | GCUACCGUCAACUUUGCUUAUGA | 3389 |
| AD-959168.1 | A-1809333.1 | 2347 | ascscgu(Chd) aadCudTuge uuaugaaL96 | A-1809334.1 | 2465 | VPusdTscad TadAgcaadA gdTugacggus asg | CUACCGUCAACUUUGCUUAUGAC | 3390 |
| AD-959169.1 | A-1809335.1 | 2348 | cscsguc(Ahd) acdTudTgcuu augacaL96 | A-1809336.1 | 2466 | VPusdGsucd AudAagcadA adGuugacggs usa | UACCGUCAACUUUGCUUAUGACA | 3391 |
| AD-959183.1 | A-1809363.1 | 2349 | usasuga(Chd) acdAgdGcac agguauaL96 | A-1809364.1 | 2467 | VPusdAsuad CcdTgugcdC udGugucauas asg | CUUAUGACACAGGCACAGGUAUC | 3392 |
| AD-959210.1 | A-1809417.1 | 2350 | ascsccu(Ghd) acdCadTccca uucaaaL96 | A-1809418.1 | 2468 | VPusdTsugd AadTgggadT gdGucagggus csu | AGACCCUGACCAUCCCAUUCAAG | 3393 |
| AD-959211.1 | A-1809419.1 | 2351 | cscscug(Ahd) ccdAudCcca uucaagaL96 | A-1809420.1 | 2469 | VPusdCsuud GadAugggd AudGgucagg gsusc | GACCCUGACCAUCCCAUUCAAGA | 3394 |
| AD-959216.1 | A-1809429.1 | 2352 | ascscau(Chd) ccdAudTcaag aaccgaL96 | A-1809430.1 | 2470 | VPusdCsggd TudCuugadA udGggauggus csa | UGACCAUCCCAUUCAAGAACCGC | 3395 |
| AD-959217.1 | A-1809431.1 | 2353 | cscsauc(Chd) cadTudCaaga accgcaL96 | A-1809432.1 | 2471 | VPusdGscgd GudTcuugdA adTgggauggs use | GACCAUCCCAUUCAAGAACCGCU | 3396 |
| AD-959239.1 | A-1809475.1 | 2354 | usasagu(Ahd) cadGcdAgca ugauugaL96 | A-1809476.1 | 2472 | VPusdCsaad TcdAugcudG cdTguacuuas usa | UAUAAGUACAGCAGCAUGAUUGA | 3397 |
| AD-959240.1 | A-1809477.1 | 2355 | asasgua(Chd) agdCadGcau gauugaaL96 | A-1809478.1 | 2473 | VPusdTscad AudCaugcdT gdCuguacuus asu | AUAAGUACAGCAGCAUGAUUGAC | 3398 |
| AD-959242.1 | A-1809481.1 | 2356 | gsusaca(Ghd) cadGcdAuga uugacuaL96 | A-1809482.1 | 2474 | VPusdAsgud CadAucaudG cdTgcuguacs usu | AAGUACAGCAGCAUGAUUGACUA | 3399 |
| AD-959262.1 | A-1809521.1 | 2357 | uscsuuu(Ghd )ccdTgdGgac aacuugaL96 | A-1809522.1 | 2475 | VPusdCsaad GudTguccdC adGgcaaagas gsc | GCUCUUUGCCUGGGACAACUUGA | 3400 |
| AD-959280.1 | A-1809557.1 | 2358 | usgsaac(Ahd) ugdGudCacu uaugacaL96 | A-1809558.1 | 2476 | VPusdGsucd AudAagugd AcdCauguuc asasg | CUUGAACAUGGUCACUUAUGACA | 3401 |
| AD-959300.1 | A-1809597.1 | 2359 | asuscaa(Ghd) cudCudCcaa gaugugaL96 | A-1809598.1 | 2477 | VPusdCsacd AudCuuggd AgdAgcuuga usgsu | ACAUCAAGCUCUCCAAGAUGUGA | 3402 |
| AD-959301.1 | A-1809599.1 | 2360 | uscsaag(Chd) ucdTcdCaaga ugugaaL96 | A-1809600.1 | 2478 | VPusdTscad CadTcuugdG adGagcuugas usg | CAUCAAGCUCUCCAAGAUGUGAA | 3403 |
| AD-959449.1 | A-1809895.1 | 2361 | ususcag(Ghd) aadTudGuag ucugagaL96 | A-1809896.1 | 2479 | VPusdCsucd AgdAcuacdA adTuccugaas usa | UAUUCAGGAAUUGUAGUCUGAGG | 3404 |
| AD-959484.1 | A-1809965.1 | 2362 | usasucu(Uhd) cudGudCagc auuuauaL96 | A-1809966.1 | 2480 | VPusdAsuad AadTgcugdA cdAgaagauas asa | UUUAUCUUCUGUCAGCAUUUAUG | 3405 |
| AD-959485.1 | A-1809967.1 | 2363 | asuscuu(Chd) ugdTcdAgca uuuaugaL96 | A-1809968.1 | 2481 | VPusdCsaud AadAugcudG adCagaagaus asa | UUAUCUUCUGUCAGCAUUUAUGG | 3406 |
| AD-959486.1 | A-1809969.1 | 2364 | uscsuuc(Uhd) gudCadGcau uuauggaL96 | A-1809970.1 | 2482 | VPusdCscad TadAaugcdT gdAcagaagas usa | UAUCUUCUGUCAGCAUUUAUGGG | 3407 |
| AD-959487.1 | A-1809971.1 | 2365 | csusucu(Ghd) ucdAgdCauu uaugggaL96 | A-1809972.1 | 2483 | VPusdCsccd AudAaaugdC udGacagaags asu | AUCUUCUGUCAGCAUUUAUGGGA | 3408 |
| AD-959489.1 | A-1809975.1 | 2366 | uscsugu(Chd) agdCadTuua ugggauaL96 | A-1809976.1 | 2484 | VPusdAsucd CcdAuaaadT gdCugacagas asg | CUUCUGUCAGCAUUUAUGGGAUG | 3409 |
| AD-959490.1 | A-1809977.1 | 2367 | csusguc(Ahd) gcdAudTuau gggaugaL96 | A-1809978.1 | 2485 | VPusdCsaud CcdCauaadA udGcugacags asa | UUCUGUCAGCAUUUAUGGGAUGU | 3410 |
| AD-959497.1 | A-1809991.1 | 2368 | csasuuu(Ahd) ugdGgdAugu uuaaugaL96 | A-1809992.1 | 2486 | VPusdCsaud TadAacaudC cdCauaaaugs csu | AGCAUUUAUGGGAUGUUUAAUGA | 3411 |
| AD-959498.1 | A-1809993.1 | 2369 | asusuua(Uhd) ggdGadTguu uaaugaaL96 | A-1809994.1 | 2487 | VPusdTscad TudAaacadT cdCcauaaaus gsc | GCAUUUAUGGGAUGUUUAAUGAC | 3412 |
| AD-959499.1 | A-1809995.1 | 2370 | ususuau(Ghd )ggdAudGuu uaaugacaL96 | A-1809996.1 | 2488 | VPusdGsucd AudTaaacdA udCccauaaas usg | CAUUUAUGGGAUGUUUAAUGACA | 3413 |
| AD-959506.1 | A-1810009.1 | 2371 | gsasugu(Uhd )uadAudGaca uaguucaL96 | A-1810010.1 | 2489 | VPusdGsaad CudAugucdA udTaaacaucs CSC | GGGAUGUUUAAUGACAUAGUUCA | 3414 |
| AD-959515.1 | A-1810027.1 | 2372 | usgsaca(Uhd) agdTudCaag uuuucuaL96 | A-1810028.1 | 2490 | VPusdAsgad AadAcuugdA adCuaugucas usu | AAUGACAUAGUUCAAGUUUUCUU | 3415 |
| AD-959516.1 | A-1810029.1 | 2373 | gsascau(Ahd) gudTcdAagu uuucuuaL96 | A-1810030.1 | 2491 | VPusdAsagd AadAacuudG adAcuaugucs asu | AUGACAUAGUUCAAGUUUUCUUG | 3416 |
| AD-959517.1 | A-1810031.1 | 2374 | ascsaua(Ghd) uudCadAguu uucuugaL96 | A-1810032.1 | 2492 | VPusdCsaad GadAaacudT gdAacuaugus csa | UGACAUAGUUCAAGUUUUCUUGU | 3417 |
| AD-959518.1 | A-1810033.1 | 2375 | csasuag(Uhd) ucdAadGuuu ucuuguaL96 | A-1810034.1 | 2493 | VPusdAscad AgdAaaacdT udGaacuaugs use | GACAUAGUUCAAGUUUUCUUGUG | 3418 |
| AD-959519.1 | A-1810035.1 | 2376 | asusagu(Uhd) cadAgdTuuu cuugugaL96 | A-1810036.1 | 2494 | VPusdCsacd AadGaaaadC udTgaacuaus gsu | ACAUAGUUCAAGUUUUCUUGUGA | 3419 |
| AD-959520.1 | A-1810037.1 | 2377 | usasguu(Chd) aadGudTuuc uugugaaL96 | A-1810038.1 | 2495 | VPusdTscad CadAgaaadA cdTugaacuas usg | CAUAGUUCAAGUUUUCUUGUGAU | 3420 |
| AD-959521.1 | A-1810039.1 | 2378 | asgsuuc(Ahd) agdTudTucu ugugauaL96 | A-1810040.1 | 2496 | VPusdAsued AcdAagaadA adCuugaacus asu | AUAGUUCAAGUUUUCUUGUGAUU | 3421 |
| AD-959524.1 | A-1810045.1 | 2379 | uscsaag(Uhd) uudTedTugu gauuugaL96 | A-1810046.1 | 2497 | VPusdCsaad AudCacaadG adAaacuugas asc | GUUCAAGUUUUCUUGUGAUUUGG | 3422 |
| AD-959560.1 | A-1810117.1 | 2380 | gsasaaa(Chd) cadTudGcuc uugcauaL96 | A-1810118.1 | 2498 | VPusdAsugd CadAgagedA adTgguuuucs asg | CUGAAAACCAUUGCCUUGCAUG | 3423 |
| AD-959561.1 | A-1810119.1 | 2381 | asasaae(Chd) audTgdCucu ugcaugaL96 | A-1810120.1 | 2499 | VPusdCsaud GcdAagagdC adAugguuuus csa | UGAAAACCAUUGCUCUUGCAUGU | 3424 |
| AD-959567.1 | A-1810131.1 | 2382 | asusugc(Uhd) cudTgdCaug uuacauaL96 | A-1810132.1 | 2500 | VPusdAsugd TadAcaugdC adAgagcaaus gsg | CCAUUGCUCUUGCAUGUUACAUG | 3425 |
| AD-959568.1 | A-1810133.1 | 2383 | ususgcu(Chd) uudGcdAugu uacaugaL96 | A-1810134.1 | 2501 | VPusdCsaud GudAacaudG cdAagagcaas usg | CAUUGCUCUUGCAUGUUACAUGG | 3426 |
| AD-959571.1 | A-1810139.1 | 2384 | csuscuu(Ghd) cadTgdTuaca ugguuaL96 | A-1810140.1 | 2502 | VPusdAsacd CadTguaadC adTgcaagags csa | UGCUCUUGCAUGUUACAUGGUUA | 3427 |
| AD-959572.1 | A-1810141.1 | 2385 | uscsuug(Chd) audGudTaca ugguuaaL96 | A-1810142.1 | 2503 | VPusdTsaad CcdAuguadA cdAugcaagas gsc | GCUCUUGCAUGUUACAUGGUUAC | 3428 |
| AD-959607.1 | A-1810211.1 | 2386 | asasaag(Chd) audAadCuuc uaaaggaL96 | A-1810212.1 | 2504 | VPusdCscud TudAgaagdT udAugcuuuus usa | UAAAAAGCAUAACUUCUAAAGGA | 3429 |
| AD-959608.1 | A-1810213.1 | 2387 | asasagc(Ahd) uadAcdTucu aaaggaaL96 | A-1810214.1 | 2505 | VPusdTsccd TudTagaadG udTaugcuuus usu | AAAAAGCAUAACUUCUAAAGGAA | 3430 |
| AD-959619.1 | A-1810235.1 | 2388 | uscsuaa(Ahd) ggdAadGcag aauagcaL96 | A-1810236.1 | 2506 | VPusdGscud AudTcugcdT udCcuuuagas asg | CUUCUAAAGGAAGCAGAAUAGCU | 3431 |
| AD-959620.1 | A-1810237.1 | 2389 | csusaaa(Ghd) gadAgdCaga auagcuaL96 | A-1810238.1 | 2507 | VPusdAsgcd TadTucugdC udTccuuuags asa | UUCUAAAGGAAGCAGAAUAGCUC | 3432 |
| AD-959661.1 | A-1810319.1 | 2390 | asasgua(Ahd) gadTgdCauu uacuacaL96 | A-1810320.1 | 2508 | VPusdGsuad GudAaaugdC adTcuuacuus asu | AUAAGUAAGAUGCAUUUACUACA | 3433 |
| AD-959682.1 | A-1810361.1 | 2391 | gsusugg(Chd )uudCudAau gcuucagaL96 | A-1810362.1 | 2509 | VPusdCsugd AadGcauudA gdAagccaacs usg | CAGUUGGCUUCUAAUGCUUCAGA | 3434 |
| AD-959689.1 | A-1810375.1 | 2392 | uscsuaa(Uhd) gcdTudCaga uagaauaL96 | A-1810376.1 | 2510 | VPusdAsuud CudAucugdA adGcauuagas asg | CUUCUAAUGCUUCAGAUAGAAUA | 3435 |
| AD-959693.1 | A-1810383.1 | 2393 | asusgcu(Uhd) cadGadTagaa uacagaL96 | A-1810384.1 | 2511 | VPusdCsugd TadTucuadT cdTgaagcaus usa | UAAUGCUUCAGAUAGAAUACAGU | 3436 |
| AD-959696.1 | A-1810389.1 | 2394 | csusuca(Ghd) audAgdAaua caguugaL96 | A-1810390.1 | 2512 | VPusdCsaad CudGuauudC udAucugaags csa | UGCUUCAGAUAGAAUACAGUUGG | 3437 |

TABLE 5B

Exemplary Human MYOC siRNA Unmodified Single Strands and Duplex Sequences

| Duplex Name | Sense Sequence Name | SEQ ID NO: (Sense) | Sense Sequence (5′-3′) | Range | Antisense Sequence Name | SEQ ID NO: (Antisense) | Antisense Sequence | mRNA Target Range |
|---|---|---|---|---|---|---|---|---|
| AD-957960.1 | A-1806917.1 | 2513 | CAGCACAGCAGAGCUUUCCAA | 33-53 | A-1806918.1 | 2631 | UTGGAAAGCUCTGCUGUGCUGAG | 31-53 |
| AD-957961.1 | A-1806919.1 | 2514 | AGCACAGCAGAGCUUUCCAGA | 34-54 | A-1806920.1 | 2632 | UCUGGAAAGCUCUGCUGUGCUGA | 32-54 |
| AD-958008.1 | A-1807013.1 | 2515 | AGGUUCUUCUGUGCACGUUGA | 81-101 | A-1807014.1 | 2633 | UCAACGTGCACAGAAGAACCUCA | 79-101 |
| AD-958009.1 | A-1807015.1 | 2516 | GGUUCUUCTGTGCACGUUGCA | 82-102 | A-1807016.1 | 2634 | UGCAACGUGCACAGAAGAACCUC | 80-102 |
| AD-958145.1 | A-1807287.1 | 2517 | GCCAGUCCCAAUGAAUCCAGA | 237-257 | A-1807288.1 | 2635 | UCUGGATUCAUTGGGACUGGCCA | 235-257 |
| AD-958368.1 | A-1807733.1 | 2518 | UCCGAGACAAGUCAGUUCUGA | 514-534 | A-1807734.1 | 2636 | UCAGAACUGACTUGUCUCGGAGG | 512-534 |
| AD-958369.1 | A-1807735.1 | 2519 | CCGAGACAAGTCAGUUCUGGA | 515-535 | A-1807736.1 | 2637 | UCCAGAACUGACUTGUCUCGGAG | 513-535 |
| AD-958488.1 | A-1807973.1 | 2520 | AGGCUCCAGAGAAGUUUCUAA | 668-688 | A-1807974.1 | 2638 | UTAGAAACUUCTCTGGAGCCUGG | 666-688 |
| AD-958489.1 | A-1807975.1 | 2521 | GGCUCCAGAGAAGUUUCUACA | 669-689 | A-1807976.1 | 2639 | UGUAGAAACUUCUCUGGAGCCUG | 667-689 |
| AD-958509.1 | A-1808015.1 | 2522 | GUGGAAUUTGGACACUUUGGA | 689-709 | A-1808016.1 | 2640 | UCCAAAGUGUCCAAAUUCCACGU | 687-709 |
| AD-958510.1 | A-1808017.1 | 2523 | UGGAAUUUGGACACUUUGGCA | 690-710 | A-1808018.1 | 2641 | UGCCAAAGUGUCCAAAUUCCACG | 688-710 |
| AD-958511.1 | A-1808019.1 | 2524 | GGAAUUUGGACACUUUGGCCA | 691-711 | A-1808020.1 | 2642 | UGGCCAAAGUGTCCAAAUUCCAC | 689-711 |
| AD-958512.1 | A-1808021.1 | 2525 | GAAUUUGGACACUUUGGCCUA | 692-712 | A-1808022.1 | 2643 | UAGGCCAAAGUGUCCAAAUUCCA | 690-712 |
| AD-958518.1 | A-1808033.1 | 2526 | GGACACUUTGGCCUUCCAGGA | 698-718 | A-1808034.1 | 2644 | UCCUGGAAGGCCAAAGUGUCCAA | 696-718 |
| AD-958532.1 | A-1808061.1 | 2527 | UCCAGGAACUGAAGUCCGAGA | 712-732 | A-1808062.1 | 2645 | UCUCGGACUUCAGTUCCUGGAAG | 710-732 |
| AD-958539.1 | A-1808075.1 | 2528 | ACUGAAGUCCGAGCUAACUGA | 719-739 | A-1808076.1 | 2646 | UCAGTUAGCUCGGACUUCAGUUC | 717-739 |
| AD-958548.1 | A-1808093.1 | 2529 | CGAGCUAACUGAAGUUCCUGA | 728-748 | A-1808094.1 | 2647 | UCAGGAACUUCAGTUAGCUCGGA | 726-748 |
| AD-958555.1 | A-1808107.1 | 2530 | ACUGAAGUTCCUGCUUCCCGA | 735-755 | A-1808108.1 | 2648 | UCGGGAAGCAGGAACUUCAGUUA | 733-755 |
| AD-958561.1 | A-1808119.1 | 2531 | GUUCCUGCTUCCCGAAUUUUA | 741-761 | A-1808120.1 | 2649 | UAAAAUTCGGGAAGCAGGAACUU | 739-761 |
| AD-958563.1 | A-1808123.1 | 2532 | UCCUGCUUCCCGAAUUUUGAA | 743-763 | A-1808124.1 | 2650 | UTCAAAAUUCGGGAAGCAGGAAC | 741-763 |
| AD-958564.1 | A-1808125.1 | 2533 | CCUGCUUCCCGAAUUUUGAAA | 744-764 | A-1808126.1 | 2651 | UTUCAAAAUUCGGGAAGCAGGAA | 742-764 |
| AD-958565.1 | A-1808127.1 | 2534 | CUGCUUCCCGAAUUUUGAAGA | 745-765 | A-1808128.1 | 2652 | UCUUCAAAAUUCGGGAAGCAGGA | 743-765 |
| AD-958566.1 | A-1808129.1 | 2535 | UGCUUCCCGAAUUUUGAAGGA | 746-766 | A-1808130.1 | 2653 | UCCUTCAAAAUTCGGGAAGCAGG | 744-766 |
| AD-958568.1 | A-1808133.1 | 2536 | CUUCCCGAAUTUUGAAGGAGA | 748-768 | A-1808134.1 | 2654 | UCUCCUTCAAAAUTCGGGAAGCA | 746-768 |
| AD-958628.1 | A-1808253.1 | 2537 | GAUGUGGAGAACUAGUUUGGA | 808-828 | A-1808254.1 | 2655 | UCCAAACUAGUTCTCCACAUCCG | 806-828 |
| AD-958629.1 | A-1808255.1 | 2538 | AUGUGGAGAACUAGUUUGGGA | 809-829 | A-1808256.1 | 2656 | UCCCAAACUAGTUCUCCACAUCC | 807-829 |
| AD-958630.1 | A-1808257.1 | 2539 | UGUGGAGAACTAGUUUGGGUA | 810-830 | A-1808258.1 | 2657 | UACCCAAACUAGUTCUCCACAUC | 808-830 |
| AD-958632.1 | A-1808261.1 | 2540 | UGGAGAACTAGUUUGGGUAGA | 812-832 | A-1808262.1 | 2658 | UCUACCCAAACTAGUUCUCCACA | 810-832 |
| AD-958633.1 | A-1808263.1 | 2541 | GGAGAACUAGTUUGGGUAGGA | 813-833 | A-1808264.1 | 2659 | UCCUACCCAAACUAGUUCUCCAC | 811-833 |
| AD-958635.1 | A-1808267.1 | 2542 | AGAACUAGTUTGGGUAGGAGA | 815-835 | A-1808268.1 | 2660 | UCUCCUACCCAAACUAGUUCUCC | 813-835 |
| AD-958671.1 | A-1808339.1 | 2543 | AACAGCAGAAACAAUUACUGA | 851-871 | A-1808340.1 | 2661 | UCAGTAAUUGUTUCUGCUGUUCU | 849-871 |
| AD-958672.1 | A-1808341.1 | 2544 | ACAGCAGAAACAAUUACUGGA | 852-872 | A-1808342.1 | 2662 | UCCAGUAAUUGTUTCUGCUGUUC | 850-872 |
| AD-958680.1 | A-1808357.1 | 2545 | AACAAUUACUGGCAAGUAUGA | 860-880 | A-1808358.1 | 2663 | UCAUACTUGCCAGTAAUUGUUUC | 858-880 |
| AD-958681.1 | A-1808359.1 | 2546 | ACAAUUACTGGCAAGUAUGGA | 861-881 | A-1808360.1 | 2664 | UCCATACUUGCCAGUAAUUGUUU | 859-881 |
| AD-958682.1 | A-1808361.1 | 2547 | CAAUUACUGGCAAGUAUGGUA | 862-882 | A-1808362.1 | 2665 | UACCAUACUUGCCAGUAAUUGUU | 860-882 |
| AD-958683.1 | A-1808363.1 | 2548 | AAUUACUGGCAAGUAUGGUGA | 863-883 | A-1808364.1 | 2666 | UCACCATACUUGCCAGUAAUUGU | 861-883 |
| AD-958684.1 | A-1808365.1 | 2549 | AUUACUGGCAAGUAUGGUGUA | 864-884 | A-1808366.1 | 2667 | UACACCAUACUTGCCAGUAAUUG | 862-884 |
| AD-958685.1 | A-1808367.1 | 2550 | UUACUGGCAAGUAUGGUGUGA | 865-885 | A-1808368.1 | 2668 | UCACACCAUACTUGCCAGUAAUU | 863-885 |
| AD-958695.1 | A-1808387.1 | 2551 | GUAUGGUGTGTGGAUGCGAGA | 875-895 | A-1808388.1 | 2669 | UCUCGCAUCCACACACCAUACUU | 873-895 |
| AD-958742.1 | A-1808481.1 | 2552 | GAUGUCCGCCAGGUUUUUGAA | 957-977 | A-1808482.1 | 2670 | UTCAAAAACCUGGCGGACAUCCG | 955-977 |
| AD-958757.1 | A-1808511.1 | 2553 | UUUGAGUATGACCUCAUCAGA | 972-992 | A-1808512.1 | 2671 | UCUGAUGAGGUCATACUCAAAAA | 970-992 |
| AD-958767.1 | A-1808531.1 | 2554 | ACCUCAUCAGCCAGUUUAUGA | 982-1002 | A-1808532.1 | 2672 | UCAUAAACUGGCUGAUGAGGUCA | 980-1002 |
| AD-958768.1 | A-1808533.1 | 2555 | CCUCAUCAGCCAGUUUAUGCA | 983-1003 | A-1808534.1 | 2673 | UGCATAAACUGGCTGAUGAGGUC | 981-1003 |
| AD-958770.1 | A-1808537.1 | 2556 | UCAUCAGCCAGUUUAUGCAGA | 985-1005 | A-1808538.1 | 2674 | UCUGCATAAACTGGCUGAUGAGG | 983-1005 |
| AD-958786.1 | A-1808569.1 | 2557 | GCAGGGCUACCCUUCUAAGGA | 1001-1021 | A-1808570.1 | 2675 | UCCUTAGAAGGGUAGCCCUGCAU | 999-1021 |
| AD-958787.1 | A-1808571.1 | 2558 | CAGGGCUACCCUUCUAAGGUA | 1002-1022 | A-1808572.1 | 2676 | UACCTUAGAAGGGTAGCCCUGCA | 1000-1022 |
| AD-958789.1 | A-1808575.1 | 2559 | GGGCUACCCUTCUAAGGUUCA | 1004-1024 | A-1808576.1 | 2677 | UGAACCTUAGAAGGGUAGCCCUG | 1002-1024 |
| AD-958797.1 | A-1808591.1 | 2560 | CUUCUAAGGUTCACAUACUGA | 1012-1032 | A-1808592.1 | 2678 | UCAGTATGUGAACCUUAGAAGGG | 1010-1032 |
| AD-958798.1 | A-1808593.1 | 2561 | UUCUAAGGTUCACAUACUGCA | 1013-1033 | A-1808594.1 | 2679 | UGCAGUAUGUGAACCUUAGAAGG | 1011-1033 |
| AD-958864.1 | A-1808725.1 | 2562 | GUCCAGAACUGUCAUAAGAUA | 1097-1117 | A-1808726.1 | 2680 | UAUCTUAUGACAGTUCUGGACUC | 1095-1117 |
| AD-958867.1 | A-1808731.1 | 2563 | CAGAACUGTCAUAAGAUAUGA | 1100-1120 | A-1808732.1 | 2681 | UCAUAUCUUAUGACAGUUCUGGA | 1098-1120 |
| AD-958868.1 | A-1808733.1 | 2564 | AGAACUGUCATAAGAUAUGAA | 1101-1121 | A-1808734.1 | 2682 | UTCATATCUUATGACAGUUCUGG | 1099-1121 |
| AD-958869.1 | A-1808735.1 | 2565 | GAACUGUCAUAAGAUAUGAGA | 1102-1122 | A-1808736.1 | 2683 | UCUCAUAUCUUAUGACAGUUCUG | 1100-1122 |
| AD-958870.1 | A-1808737.1 | 2566 | AACUGUCATAAGAUAUGAGCA | 1103-1123 | A-1808738.1 | 2684 | UGCUCATAUCUTATGACAGUUCU | 1101-1123 |
| AD-958879.1 | A-1808755.1 | 2567 | AAGAUAUGAGCUGAAUACCGA | 1112-1132 | A-1808756.1 | 2685 | UCGGTATUCAGCUCAUAUCUUAU | 1110-1132 |
| AD-958880.1 | A-1808757.1 | 2568 | AGAUAUGAGCTGAAUACCGAA | 1113-1133 | A-1808758.1 | 2686 | UTCGGUAUUCAGCTCAUAUCUUA | 1111-1133 |
| AD-958881.1 | A-1808759.1 | 2569 | GAUAUGAGCUGAAUACCGAGA | 1114-1134 | A-1808760.1 | 2687 | UCUCGGTAUUCAGCUCAUAUCUU | 1112-1134 |
| AD-958890.1 | A-1808777.1 | 2570 | UGAAUACCGAGACAGUGAAGA | 1123-1143 | A-1808778.1 | 2688 | UCUUCACUGUCTCGGUAUUCAGC | 1121-1143 |
| AD-958891.1 | A-1808779.1 | 2571 | GAAUACCGAGACAGUGAAGGA | 1124-1144 | A-1808780.1 | 2689 | UCCUTCACUGUCUCGGUAUUCAG | 1122-1144 |
| AD-958938.1 | A-1808873.1 | 2572 | ACCACGGACAGUUCCCGUAUA | 1171-1191 | A-1808874.1 | 2690 | UAUACGGGAACTGTCCGUGGUAG | 1169-1191 |
| AD-958942.1 | A-1808881.1 | 2573 | CGGACAGUTCCCGUAUUCUUA | 1175-1195 | A-1808882.1 | 2691 | UAAGAATACGGGAACUGUCCGUG | 1173-1195 |
| AD-958943.1 | A-1808883.1 | 2574 | GGACAGUUCCCGUAUUCUUGA | 1176-1196 | A-1808884.1 | 2692 | UCAAGAAUACGGGAACUGUCCGU | 1174-1196 |
| AD-958944.1 | A-1808885.1 | 2575 | GACAGUUCCCGUAUUCUUGGA | 1177-1197 | A-1808886.1 | 2693 | UCCAAGAAUACGGGAACUGUCCG | 1175-1197 |
| AD-958983.1 | A-1808963.1 | 2576 | CAGGCCUCTGGGUCAUUUACA | 1234-1254 | A-1808964.1 | 2694 | UGUAAATGACCCAGAGGCCUGCU | 1232-1254 |
| AD-958984.1 | A-1808965.1 | 2577 | AGGCCUCUGGGUCAUUUACAA | 1235-1255 | A-1808966.1 | 2695 | UTGUAAAUGACCCAGAGGCCUGC | 1233-1255 |
| AD-958985.1 | A-1808967.1 | 2578 | GGCCUCUGGGTCAUUUACAGA | 1236-1256 | A-1808968.1 | 2696 | UCUGTAAAUGACCCAGAGGCCUG | 1234-1256 |
| AD-959013.1 | A-1809023.1 | 2579 | AGGCCAAAGGTGCCAUUGUCA | 1264-1284 | A-1809024.1 | 2697 | UGACAATGGCACCTUUGGCCUCA | 1262-1284 |
| AD-959025.1 | A-1809047.1 | 2580 | CCAUUGUCCUCUCCAAACUGA | 1276-1296 | A-1809048.1 | 2698 | UCAGTUTGGAGAGGACAAUGGCA | 1274-1296 |
| AD-959102.1 | A-1809201.1 | 2581 | GUCGCCAATGCCUUCAUCAUA | 1353-1373 | A-1809202.1 | 2699 | UAUGAUGAAGGCATUGGCGACUG | 1351-1373 |
| AD-959167.1 | A-1809331.1 | 2582 | UACCGUCAACTUUGCUUAUGA | 1418-1438 | A-1809332.1 | 2700 | UCAUAAGCAAAGUTGACGGUAGC | 1416-1438 |
| AD-959168.1 | A-1809333.1 | 2583 | ACCGUCAACUTUGCUUAUGAA | 1419-1439 | A-1809334.1 | 2701 | UTCATAAGCAAAGTUGACGGUAG | 1417-1439 |
| AD-959169.1 | A-1809335.1 | 2584 | CCGUCAACTUTGCUUAUGACA | 1420-1440 | A-1809336.1 | 2702 | UGUCAUAAGCAAAGUUGACGGUA | 1418-1440 |
| AD-959183.1 | A-1809363.1 | 2585 | UAUGACACAGGCACAGGUAUA | 1434-1454 | A-1809364.1 | 2703 | UAUACCTGUGCCUGUGUCAUAAG | 1432-1454 |
| AD-959210.1 | A-1809417.1 | 2586 | ACCCUGACCATCCCAUUCAAA | 1461-1481 | A-1809418.1 | 2704 | UTUGAATGGGATGGUCAGGGUCU | 1459-1481 |
| AD-959211.1 | A-1809419.1 | 2587 | CCCUGACCAUCCCAUUCAAGA | 1462-1482 | A-1809420.1 | 2705 | UCUUGAAUGGGAUGGUCAGGGUC | 1460-1482 |
| AD-959216.1 | A-1809429.1 | 2588 | ACCAUCCCAUTCAAGAACCGA | 1467-1487 | A-1809430.1 | 2706 | UCGGTUCUUGAAUGGGAUGGUCA | 1465-1487 |
| AD-959217.1 | A-1809431.1 | 2589 | CCAUCCCATUCAAGAACCGCA | 1468-1488 | A-1809432.1 | 2707 | UGCGGUTCUUGAATGGGAUGGUC | 1466-1488 |
| AD-959239.1 | A-1809475.1 | 2590 | UAAGUACAGCAGCAUGAUUGA | 1490-1510 | A-1809476.1 | 2708 | UCAATCAUGCUGCTGUACUUAUA | 1488-1510 |
| AD-959240.1 | A-1809477.1 | 2591 | AAGUACAGCAGCAUGAUUGAA | 1491-1511 | A-1809478.1 | 2709 | UTCAAUCAUGCTGCUGUACUUAU | 1489-1511 |
| AD-959242.1 | A-1809481.1 | 2592 | GUACAGCAGCAUGAUUGACUA | 1493-1513 | A-1809482.1 | 2710 | UAGUCAAUCAUGCTGCUGUACUU | 1491-1513 |
| AD-959262.1 | A-1809521.1 | 2593 | UCUUUGCCTGGGACAACUUGA | 1534-1554 | A-1809522.1 | 2711 | UCAAGUTGUCCCAGGCAAAGAGC | 1532-1554 |
| AD-959280.1 | A-1809557.1 | 2594 | UGAACAUGGUCACUUAUGACA | 1552-1572 | A-1809558.1 | 2712 | UGUCAUAAGUGACCAUGUUCAAG | 1550-1572 |
| AD-959300.1 | A-1809597.1 | 2595 | AUCAAGCUCUCCAAGAUGUGA | 1572-1592 | A-1809598.1 | 2713 | UCACAUCUUGGAGAGCUUGAUGU | 1570-1592 |
| AD-959301.1 | A-1809599.1 | 2596 | UCAAGCUCTCCAAGAUGUGAA | 1573-1593 | A-1809600.1 | 2714 | UTCACATCUUGGAGAGCUUGAUG | 1571-1593 |
| AD-959449.1 | A-1809895.1 | 2597 | UUCAGGAATUGUAGUCUGAGA | 1752-1772 | A-1809896.1 | 2715 | UCUCAGACUACAATUCCUGAAUA | 1750-1772 |
| AD-959484.1 | A-1809965.1 | 2598 | UAUCUUCUGUCAGCAUUUAUA | 1804-1824 | A-1809966.1 | 2716 | UAUAAATGCUGACAGAAGAUAAA | 1802-1824 |
| AD-959485.1 | A-1809967.1 | 2599 | AUCUUCUGTCAGCAUUUAUGA | 1805-1825 | A-1809968.1 | 2717 | UCAUAAAUGCUGACAGAAGAUAA | 1803-1825 |
| AD-959486.1 | A-1809969.1 | 2600 | UCUUCUGUCAGCAUUUAUGGA | 1806-1826 | A-1809970.1 | 2718 | UCCATAAAUGCTGACAGAAGAUA | 1804-1826 |
| AD-959487.1 | A-1809971.1 | 2601 | CUUCUGUCAGCAUUUAUGGGA | 1807-1827 | A-1809972.1 | 2719 | UCCCAUAAAUGCUGACAGAAGAU | 1805-1827 |
| AD-959489.1 | A-1809975.1 | 2602 | UCUGUCAGCATUUAUGGGAUA | 1809-1829 | A-1809976.1 | 2720 | UAUCCCAUAAATGCUGACAGAAG | 1807-1829 |
| AD-959490.1 | A-1809977.1 | 2603 | CUGUCAGCAUTUAUGGGAUGA | 1810-1830 | A-1809978.1 | 2721 | UCAUCCCAUAAAUGCUGACAGAA | 1808-1830 |
| AD-959497.1 | A-1809991.1 | 2604 | CAUUUAUGGGAUGUUUAAUGA | 1817-1837 | A-1809992.1 | 2722 | UCAUTAAACAUCCCAUAAAUGCU | 1815-1837 |
| AD-959498.1 | A-1809993.1 | 2605 | AUUUAUGGGATGUUUAAUGAA | 1818-1838 | A-1809994.1 | 2723 | UTCATUAAACATCCCAUAAAUGC | 1816-1838 |
| AD-959499.1 | A-1809995.1 | 2606 | UUUAUGGGAUGUUUAAUGACA | 1819-1839 | A-1809996.1 | 2724 | UGUCAUTAAACAUCCCAUAAAUG | 1817-1839 |
| AD-959506.1 | A-1810009.1 | 2607 | GAUGUUUAAUGACAUAGUUCA | 1826-1846 | A-1810010.1 | 2725 | UGAACUAUGUCAUTAAACAUCCC | 1824-1846 |
| AD-959515.1 | A-1810027.1 | 2608 | UGACAUAGTUCAAGUUUUCUA | 1835-1855 | A-1810028.1 | 2726 | UAGAAAACUUGAACUAUGUCAUU | 1833-1855 |
| AD-959516.1 | A-1810029.1 | 2609 | GACAUAGUTCAAGUUUUCUUA | 1836-1856 | A-1810030.1 | 2727 | UAAGAAAACUUGAACUAUGUCAU | 1834-1856 |
| AD-959517.1 | A-1810031.1 | 2610 | ACAUAGUUCAAGUUUUCUUGA | 1837-1857 | A-1810032.1 | 2728 | UCAAGAAAACUTGAACUAUGUCA | 1835-1857 |
| AD-959518.1 | A-1810033.1 | 2611 | CAUAGUUCAAGUUUUCUUGUA | 1838-1858 | A-1810034.1 | 2729 | UACAAGAAAACTUGAACUAUGUC | 1836-1858 |
| AD-959519.1 | A-1810035.1 | 2612 | AUAGUUCAAGTUUUCUUGUGA | 1839-1859 | A-1810036.1 | 2730 | UCACAAGAAAACUTGAACUAUGU | 1837-1859 |
| AD-959520.1 | A-1810037.1 | 2613 | UAGUUCAAGUTUUCUUGUGAA | 1840-1860 | A-1810038.1 | 2731 | UTCACAAGAAAACTUGAACUAUG | 1838-1860 |
| AD-959521.1 | A-1810039.1 | 2614 | AGUUCAAGTUTUCUUGUGAUA | 1841-1861 | A-1810040.1 | 2732 | UAUCACAAGAAAACUUGAACUAU | 1839-1861 |
| AD-959524.1 | A-1810045.1 | 2615 | UCAAGUUUTCTUGUGAUUUGA | 1844-1864 | A-1810046.1 | 2733 | UCAAAUCACAAGAAAACUUGAAC | 1842-1864 |
| AD-959560.1 | A-1810117.1 | 2616 | GAAAACCATUGCUCUUGCAUA | 1898-1918 | A-1810118.1 | 2734 | UAUGCAAGAGCAATGGUUUUCAG | 1896-1918 |
| AD-959561.1 | A-1810119.1 | 2617 | AAAACCAUTGCUCUUGCAUGA | 1899-1919 | A-1810120.1 | 2735 | UCAUGCAAGAGCAAUGGUUUUCA | 1897-1919 |
| AD-959567.1 | A-1810131.1 | 2618 | AUUGCUCUTGCAUGUUACAUA | 1905-1925 | A-1810132.1 | 2736 | UAUGTAACAUGCAAGAGCAAUGG | 1903-1925 |
| AD-959568.1 | A-1810133.1 | 2619 | UUGCUCUUGCAUGUUACAUGA | 1906-1926 | A-1810134.1 | 2737 | UCAUGUAACAUGCAAGAGCAAUG | 1904-1926 |
| AD-959571.1 | A-1810139.1 | 2620 | CUCUUGCATGTUACAUGGUUA | 1909-1929 | A-1810140.1 | 2738 | UAACCATGUAACATGCAAGAGCA | 1907-1929 |
| AD-959572.1 | A-1810141.1 | 2621 | UCUUGCAUGUTACAUGGUUAA | 1910-1930 | A-1810142.1 | 2739 | UTAACCAUGUAACAUGCAAGAGC | 1908-1930 |
| AD-959607.1 | A-1810211.1 | 2622 | AAAAGCAUAACUUCUAAAGGA | 1945-1965 | A-1810212.1 | 2740 | UCCUTUAGAAGTUAUGCUUUUUA | 1943-1965 |
| AD-959608.1 | A-1810213.1 | 2623 | AAAGCAUAACTUCUAAAGGAA | 1946-1966 | A-1810214.1 | 2741 | UTCCTUTAGAAGUTAUGCUUUUU | 1944-1966 |
| AD-959619.1 | A-1810235.1 | 2624 | UCUAAAGGAAGCAGAAUAGCA | 1957-1977 | A-1810236.1 | 2742 | UGCUAUTCUGCTUCCUUUAGAAG | 1955-1977 |
| AD-959620.1 | A-1810237.1 | 2625 | CUAAAGGAAGCAGAAUAGCUA | 1958-1978 | A-1810238.1 | 2743 | UAGCTATUCUGCUTCCUUUAGAA | 1956-1978 |
| AD-959661.1 | A-1810319.1 | 2626 | AAGUAAGATGCAUUUACUACA | 1999-2019 | A-1810320.1 | 2744 | UGUAGUAAAUGCATCUUACUUAU | 1997-2019 |
| AD-959682.1 | A-1810361.1 | 2627 | GUUGGCUUCUAAUGCUUCAGA | 2020-2040 | A-1810362.1 | 2745 | UCUGAAGCAUUAGAAGCCAACUG | 2018-2040 |
| AD-959689.1 | A-1810375.1 | 2628 | UCUAAUGCTUCAGAUAGAAUA | 2027-2047 | A-1810376.1 | 2746 | UAUUCUAUCUGAAGCAUUAGAAG | 2025-2047 |
| AD-959693.1 | A-1810383.1 | 2629 | AUGCUUCAGATAGAAUACAGA | 2031-2051 | A-1810384.1 | 2747 | UCUGTATUCUATCTGAAGCAUUA | 2029-2051 |
| AD-959696.1 | A-1810389.1 | 2630 | CUUCAGAUAGAAUACAGUUGA | 2034-2054 | A-1810390.1 | 2748 | UCAACUGUAUUCUAUCUGAAGCA | 2032-2054 |

### Example 2. In Vitro Screening of MYOC siRNA

### Experimental Methods

### Dual-Glo® Luciferase Assay

[0764] Hepal-6 cells (ATCC) were grown to near confluence at 37° C. in an atmosphere of 5% CO₂ in DMEM (ATCC) supplemented with 10% FBS, before being released from the plate by trypsinization. A single-dose experiment was performed at lOnM final duplex concentration. Anti-MYOC siRNAs and psiCHECK2-MYOC (GenBank Accession No. ) plasmid transfection was carried out with a plasmid containing the 3′ untranslated region (UTR). Transfection was carried out by adding 10 nM of siRNA duplexes and 30 ng of the psiCHECK2-MYOC plasmid per well along with 4.9 µL of Opti-MEM plus 0.5 µL of Lipofectamine 2000 per well (Invitrogen, Carlsbad CA. cat # 13778-150) and then incubated at room temperature for 15 minutes. The mixture was then added to the cells (approximately 15,000 per well), which were re-suspended in 35 µL of fresh complete media. The transfected cells were incubated at 37° C. in an atmosphere of 5% CO₂.

[0765] Twenty-four hours after, the siRNAs and psiCHECK2-MYOC plasmid were transfected; Firefly (transfection control) and Renilla (fused to MYOC target sequence) luciferase were measured. First, media was removed from cells. Then Firefly luciferase activity was measured by adding 20 µL of Dual-Glo® Luciferase Reagent (Promega) equal to the culture medium volume to each well and mixing. The mixture was incubated at room temperature for 30 minutes before luminescence (500 nm) was measured on a Spectramax (Molecular Devices) to detect the Firefly luciferase signal. Renilla luciferase activity was measured by adding 20 µL of room temperature of Dual-Glo® Stop & Glo® Reagent (Promega) were added to each well and the plates were incubated for 10-15 minutes before luminescence was again measured to determine the Renilla luciferase signal. The Dual-Glo® Stop & Glo® Reagent quenched the firefly luciferase signal and sustained luminescence for the Renilla luciferase reaction. siRNA activity was determined by normalizing the Renilla (MYOC) signal to the Firefly (control) signal within each well. The magnitude of siRNA activity was then assessed relative to cells that were transfected with the same vector but were not treated with siRNA or were treated with a non-MYOC targeting siRNA. All transfections are done with n=4.

### Results

[0766] The results of the single-dose dual luciferase screen in Hepal-6 cells transfected with the MYOCplasmid (added at 30 ng/well) and treated with an exemplary set of MYOC siRNAs is shown in Table 6 (correspond to siRNAs in Table 2A). The single-dose experiment was performed at a 10 nM final duplex concentration and the data are expressed as percent MYOC luciferase signal remaining relative to cells treated with a non-targeting control.

[0767] Of the siRNA duplexes evaluated in cells transfected with MYOC, 57 achieved ≥ 80% knockdown of MYOC, 188 achieved ≥ 60% knockdown of MYOC, 226 achieved ≥ 40% knockdown of MYOC, and 264 achieved >20% knockdown of MYOC.

TABLE 6

MYOC in vitro dual luciferase lOnM screen with one set of exemplary human MYOC siRNAs
10 nM

| Duplex Name | % of MYOC Luciferase Signal Remaining | StDev |
|---|---|---|
| AD-886932.1 | 28.7 | 0.024 |
| AD-886933.1 | 37.1 | 0.045 |
| AD-886934.1 | 33.1 | 0.021 |
| AD-886935.1 | 10.1 | 0.010 |
| AD-886936.1 | 34.8 | 0.051 |
| AD-886937.1 | 28.2 | 0.052 |
| AD-886938.1 | 26.5 | 0.037 |
| AD-886939.1 | 49.0 | 0.068 |
| AD-886940.1 | 30.4 | 0.047 |
| AD-886941.1 | 24.9 | 0.033 |
| AD-886942.1 | 46.1 | 0.067 |
| AD-886943.1 | 22.9 | 0.013 |
| AD-886944.1 | 31.1 | 0.025 |
| AD-886945.1 | 81.6 | 0.108 |
| AD-886946.1 | 20.1 | 0.025 |
| AD-886947.1 | 20.5 | 0.040 |
| AD-886948.1 | 21.8 | 0.015 |
| AD-886949.1 | 33.2 | 0.049 |
| AD-886950.1 | 26.1 | 0.023 |
| AD-886951.1 | 28.6 | 0.027 |
| AD-886952.1 | 92.6 | 0.153 |
| AD-886953.1 | 56.1 | 0.021 |
| AD-886954.1 | 34.4 | 0.045 |
| AD-886955.1 | 50.8 | 0.084 |
| AD-886956.1 | 66.5 | 0.055 |
| AD-886957.1 | 31.4 | 0.054 |
| AD-886958.1 | 16.8 | 0.011 |
| AD-886959.1 | 51.0 | 0.078 |
| AD-886960.1 | 61.2 | 0.102 |
| AD-886961.1 | 21.0 | 0.016 |
| AD-886962.1 | 20.1 | 0.009 |
| AD-886963.1 | 94.5 | 0.096 |
| AD-886964.1 | 49.7 | 0.069 |
| AD-886965.1 | 18.9 | 0.014 |
| AD-886966.1 | 85.4 | 0.050 |
| AD-886967.1 | 19.6 | 0.015 |
| AD-886968.1 | 24.9 | 0.040 |
| AD-886969.1 | 18.5 | 0.018 |
| AD-886970.1 | 19.9 | 0.015 |
| AD-886971.1 | 29.9 | 0.050 |
| AD-886972.1 | 60.1 | 0.081 |
| AD-886973.1 | 82.9 | 0.059 |
| AD-886974.1 | 31.1 | 0.033 |
| AD-886975.1 | 30.0 | 0.029 |
| AD-886976.1 | 42.3 | 0.046 |
| AD-886977.1 | 60.5 | 0.049 |
| AD-886978.1 | 19.6 | 0.033 |
| AD-886979.1 | 11.6 | 0.010 |
| AD-886980.1 | 15.7 | 0.013 |
| AD-886981.1 | 14.5 | 0.020 |
| AD-886982.1 | 15.5 | 0.023 |
| AD-886983.1 | 13.5 | 0.012 |
| AD-886984.1 | 15.3 | 0.029 |
| AD-886985.1 | 27.2 | 0.014 |
| AD-886986.1 | 22.7 | 0.037 |
| AD-886987.1 | 18.2 | 0.009 |
| AD-886988.1 | 57.4 | 0.038 |
| AD-886989.1 | 15.1 | 0.025 |
| AD-886990.1 | 20.6 | 0.026 |
| AD-886991.1 | 26.7 | 0.022 |
| AD-886992.1 | 17.8 | 0.036 |
| AD-886993.1 | 20.8 | 0.041 |
| AD-886994.1 | 39.7 | 0.036 |
| AD-886995.1 | 48.0 | 0.042 |
| AD-886996.1 | 72.0 | 0.148 |
| AD-886997.1 | 61.4 | 0.116 |
| AD-886998.1 | 20.4 | 0.017 |
| AD-886999.1 | 76.8 | 0.089 |
| AD-887000.1 | 33.2 | 0.029 |
| AD-887001.1 | 19.5 | 0.011 |
| AD-887002.1 | 18.8 | 0.024 |
| AD-887003.1 | 33.2 | 0.053 |
| AD-887004.1 | 17.3 | 0.011 |
| AD-887005.1 | 25.3 | 0.065 |
| AD-887006.1 | 40.6 | 0.047 |
| AD-887007.1 | 22.5 | 0.032 |
| AD-887008.1 | 23.8 | 0.038 |
| AD-887009.1 | 12.3 | 0.030 |
| AD-887010.1 | 21.4 | 0.022 |
| AD-887011.1 | 20.0 | 0.019 |
| AD-887012.1 | 29.5 | 0.047 |
| AD-887013.1 | 68.8 | 0.038 |
| AD-887014.1 | 28.5 | 0.040 |
| AD-887015.1 | 107.7 | 0.043 |
| AD-887016.1 | 23.7 | 0.020 |
| AD-887017.1 | 22.1 | 0.045 |
| AD-887018.1 | 28.4 | 0.039 |
| AD-887019.1 | 23.2 | 0.018 |
| AD-887020.1 | 21.7 | 0.031 |
| AD-887021.1 | 20.0 | 0.006 |
| AD-887022.1 | 19.3 | 0.020 |
| AD-887023.1 | 19.9 | 0.027 |
| AD-887024.1 | 66.1 | 0.103 |
| AD-887025.1 | 49.9 | 0.110 |
| AD-887026.1 | 52.8 | 0.045 |
| AD-887027.1 | 39.4 | 0.073 |
| AD-887028.1 | 19.8 | 0.013 |
| AD-887029.1 | 16.5 | 0.030 |
| AD-887030.1 | 24.7 | 0.029 |
| AD-887031.1 | 20.9 | 0.019 |
| AD-887032.1 | 39.3 | 0.045 |
| AD-887033.1 | 36.5 | 0.047 |
| AD-887034.1 | 17.3 | 0.018 |
| AD-887035.1 | 71.2 | 0.028 |
| AD-887036.1 | 92.0 | 0.069 |
| AD-887037.1 | 15.6 | 0.010 |
| AD-887038.1 | 72.4 | 0.040 |
| AD-887039.1 | 16.5 | 0.017 |
| AD-887040.1 | 63.0 | 0.100 |
| AD-887041.1 | 28.8 | 0.043 |
| AD-887042.1 | 19.4 | 0.039 |
| AD-887043.1 | 21.5 | 0.021 |
| AD-887044.1 | 18.3 | 0.016 |
| AD-887045.1 | 18.8 | 0.009 |
| AD-887046.1 | 37.4 | 0.016 |
| AD-887047.1 | 59.5 | 0.053 |
| AD-887048.1 | 30.6 | 0.038 |
| AD-887049.1 | 22.9 | 0.031 |
| AD-887050.1 | 24.8 | 0.038 |
| AD-887051.1 | 26.9 | 0.011 |
| AD-887052.1 | 21.9 | 0.018 |
| AD-887053.1 | 29.1 | 0.013 |
| AD-887054.1 | 46.9 | 0.052 |
| AD-887055.1 | 74.8 | 0.085 |
| AD-887056.1 | 29.6 | 0.036 |
| AD-887057.1 | 24.8 | 0.028 |
| AD-887058.1 | 30.5 | 0.032 |
| AD-887059.1 | 97.6 | 0.113 |
| AD-887060.1 | 84.0 | 0.023 |
| AD-887061.1 | 32.8 | 0.060 |
| AD-887062.1 | 35.0 | 0.015 |
| AD-887063.1 | 19.8 | 0.027 |
| AD-887064.1 | 18.8 | 0.026 |
| AD-887065.1 | 21.1 | 0.006 |
| AD-887066.1 | 106.6 | 0.053 |
| AD-887067.1 | 28.9 | 0.018 |
| AD-887068.1 | 46.5 | 0.101 |
| AD-887069.1 | 31.0 | 0.052 |
| AD-887070.1 | 36.2 | 0.036 |
| AD-887071.1 | 45.6 | 0.068 |
| AD-887072.1 | 24.1 | 0.021 |
| AD-887073.1 | 26.9 | 0.019 |
| AD-887074.1 | 34.8 | 0.043 |
| AD-887075.1 | 16.3 | 0.040 |
| AD-887076.1 | 16.2 | 0.051 |
| AD-887077.1 | 20.9 | 0.020 |
| AD-887078.1 | 48.6 | 0.051 |
| AD-887079.1 | 23.2 | 0.025 |
| AD-887080.1 | 19.0 | 0.019 |
| AD-887081.1 | 43.2 | 0.106 |
| AD-887082.1 | 37.6 | 0.073 |
| AD-887083.1 | 48.3 | 0.036 |
| AD-887084.1 | 24.8 | 0.036 |
| AD-887085.1 | 32.2 | 0.033 |
| AD-887086.1 | 48.1 | 0.044 |
| AD-887087.1 | 82.8 | 0.090 |
| AD-887088.1 | 28.5 | 0.020 |
| AD-887089.1 | 22.8 | 0.020 |
| AD-887090.1 | 36.1 | 0.058 |
| AD-887091.1 | 67.5 | 0.108 |
| AD-887092.1 | 23.5 | 0.036 |
| AD-887093.1 | 13.6 | 0.009 |
| AD-887094.1 | 16.9 | 0.012 |
| AD-887095.1 | 76.2 | 0.055 |
| AD-887096.1 | 21.5 | 0.028 |
| AD-887097.1 | 35.2 | 0.020 |
| AD-887098.1 | 32.3 | 0.034 |
| AD-887099.1 | 29.6 | 0.019 |
| AD-887100.1 | 34.5 | 0.028 |
| AD-887101.1 | 26.2 | 0.026 |
| AD-887102.1 | 23.8 | 0.023 |
| AD-887103.1 | 30.4 | 0.042 |
| AD-887104.1 | 24.4 | 0.031 |
| AD-887105.1 | 47.5 | 0.013 |
| AD-887106.1 | 67.8 | 0.043 |
| AD-887107.1 | 24.2 | 0.018 |
| AD-887108.1 | 28.8 | 0.066 |
| AD-887109.1 | 34.8 | 0.032 |
| AD-887110.1 | 85.9 | 0.092 |
| AD-887111.1 | 66.2 | 0.047 |
| AD-887112.1 | 25.5 | 0.038 |
| AD-887113.1 | 18.6 | 0.017 |
| AD-887114.1 | 41.1 | 0.034 |
| AD-887115.1 | 70.9 | 0.026 |
| AD-887116.1 | 70.0 | 0.121 |
| AD-887117.1 | 64.6 | 0.069 |
| AD-887118.1 | 98.2 | 0.030 |
| AD-887119.1 | 21.9 | 0.023 |
| AD-887120.1 | 92.2 | 0.090 |
| AD-887121.1 | 49.3 | 0.078 |
| AD-887122.1 | 28.1 | 0.028 |
| AD-887123.1 | 23.7 | 0.029 |
| AD-887124.1 | 22.5 | 0.011 |
| AD-887125.1 | 21.5 | 0.032 |
| AD-887126.1 | 26.8 | 0.041 |
| AD-887127.1 | 100.1 | 0.114 |
| AD-887128.1 | 72.8 | 0.042 |
| AD-887129.1 | 89.7 | 0.076 |
| AD-887130.1 | 23.6 | 0.014 |
| AD-887131.1 | 24.7 | 0.051 |
| AD-887132.1 | 42.6 | 0.021 |
| AD-887133.1 | 23.5 | 0.024 |
| AD-887134.1 | 22.1 | 0.021 |
| AD-887135.1 | 96.4 | 0.098 |
| AD-887136.1 | 22.6 | 0.033 |
| AD-887137.1 | 22.2 | 0.023 |
| AD-887138.1 | 87.8 | 0.165 |
| AD-887139.1 | 91.5 | 0.067 |
| AD-887140.1 | 91.7 | 0.091 |
| AD-887141.1 | 80.0 | 0.145 |
| AD-887142.1 | 22.8 | 0.009 |
| AD-887143.1 | 33.5 | 0.043 |
| AD-887144.1 | 25.3 | 0.032 |
| AD-887145.1 | 41.1 | 0.012 |
| AD-887146.1 | 41.6 | 0.048 |
| AD-887147.1 | 51.7 | 0.015 |
| AD-887148.1 | 66.1 | 0.081 |
| AD-887149.1 | 16.4 | 0.038 |
| AD-887150.1 | 16.3 | 0.012 |
| AD-887151.1 | 71.3 | 0.108 |
| AD-887152.1 | 72.7 | 0.101 |
| AD-887153.1 | 25.2 | 0.016 |
| AD-887154.1 | 83.2 | 0.105 |
| AD-887155.1 | 71.8 | 0.020 |
| AD-887156.1 | 72.8 | 0.031 |
| AD-887157.1 | 57.2 | 0.099 |
| AD-887158.1 | 19.6 | 0.014 |
| AD-887159.1 | 52.2 | 0.043 |
| AD-887160.1 | 67.9 | 0.024 |
| AD-887161.1 | 20.9 | 0.025 |
| AD-887162.1 | 16.3 | 0.037 |
| AD-887163.1 | 21.6 | 0.004 |
| AD-887164.1 | 68.1 | 0.061 |
| AD-887165.1 | 75.1 | 0.106 |
| AD-887166.1 | 14.5 | 0.009 |
| AD-887167.1 | 70.5 | 0.064 |
| AD-887168.1 | 21.5 | 0.054 |
| AD-887169.1 | 13.5 | 0.032 |
| AD-887170.1 | 39.5 | 0.031 |
| AD-887171.1 | 14.8 | 0.039 |
| AD-887172.1 | 13.3 | 0.022 |
| AD-887173.1 | 19.8 | 0.031 |
| AD-887174.1 | 15.6 | 0.024 |
| AD-887175.1 | 45.0 | 0.068 |
| AD-887176.1 | 57.3 | 0.048 |
| AD-887177.1 | 14.6 | 0.020 |
| AD-887178.1 | 20.1 | 0.012 |
| AD-887179.1 | 25.4 | 0.032 |
| AD-887180.1 | 16.8 | 0.006 |
| AD-887181.1 | 61.9 | 0.034 |
| AD-887182.1 | 86.6 | 0.037 |
| AD-887183.1 | 15.2 | 0.011 |
| AD-887184.1 | 16.1 | 0.021 |
| AD-887185.1 | 25.9 | 0.017 |
| AD-887186.1 | 21.6 | 0.013 |
| AD-887187.1 | 19.7 | 0.019 |
| AD-887188.1 | 14.6 | 0.013 |
| AD-887189.1 | 83.3 | 0.054 |
| AD-887190.1 | 78.1 | 0.092 |
| AD-887191.1 | 34.9 | 0.013 |
| AD-887192.1 | 34.4 | 0.026 |
| AD-887193.1 | 37.3 | 0.047 |
| AD-887194.1 | 79.7 | 0.072 |
| AD-887195.1 | 69.3 | 0.049 |
| AD-887196.1 | 40.4 | 0.029 |
| AD-887197.1 | 34.8 | 0.029 |
| AD-887198.1 | 57.2 | 0.049 |
| AD-887199.1 | 73.7 | 0.075 |
| AD-887200.1 | 58.6 | 0.066 |
| AD-887201.1 | 91.6 | 0.175 |
| AD-887202.1 | 44.0 | 0.053 |
| AD-887203.1 | 81.7 | 0.053 |
| AD-887204.1 | 94.5 | 0.085 |
| AD-887205.1 | 33.0 | 0.007 |
| AD-887206.1 | 103.4 | 0.143 |
| AD-887207.1 | 79.4 | 0.074 |
| AD-887208.1 | 42.5 | 0.059 |
| AD-887209.1 | 25.9 | 0.051 |
| AD-887210.1 | 30.2 | 0.013 |
| AD-887211.1 | 33.8 | 0.033 |
| AD-887212.1 | 35.9 | 0.065 |
| AD-887213.1 | 28.1 | 0.019 |
| AD-887214.1 | 46.9 | 0.035 |
| AD-887215.1 | 24.7 | 0.030 |
| AD-887216.1 | 64.4 | 0.116 |
| AD-887217.1 | 17.3 | 0.031 |
| AD-887218.1 | 21.9 | 0.032 |
| AD-887219.1 | 90.4 | 0.133 |
| AD-887220.1 | 100.8 | 0.203 |
| AD-887221.1 | 33.7 | 0.008 |
| AD-887222.1 | 23.1 | 0.022 |
| AD-887223.1 | 100.5 | 0.070 |
| AD-887224.1 | 82.8 | 0.053 |
| AD-887225.1 | 85.5 | 0.096 |
| AD-887226.1 | 82.9 | 0.088 |
| AD-887227.1 | 97.9 | 0.123 |
| AD-887228.1 | 85.8 | 0.034 |
| AD-887229.1 | 90.9 | 0.137 |
| AD-887230.1 | 42.6 | 0.080 |
| AD-887231.1 | 29.3 | 0.056 |

### Example 3. In Vitro Screening of MYOC siRNA

### Experimental Methods

### Cell Culture and Transfections

### Human Trabecular Meshwork Cells (HTMC) Cell Transfections

[0768] HTMC cells (ATCC) were transfected by adding 4.9 µl of Opti-MEM plus 0.1 µl of RNAiMAX per well (Invitrogen, Carlsbad CA. cat # 13778-150) to 5 µl of siRNA duplexes per well, with 4 replicates of each siRNA duplex, into a 384-well plate, and incubated at room temperature for 15 minutes. Forty µl of DMEM:F12 Medium (ThermoFisher) containing ~5 ×10³ cells were then added to the siRNA-transfection mixture. Cells were incubated for 24 hours prior to RNA purification. Experiments were performed at 50 nM, 10 nM, 1 nM, and 0.1 nM.

### Total RNA Isolation Using DYNABEADS mRNA Isolation Kit

[0769] RNA was isolated using an automated protocol on a BioTek-EL406 platform using DYNABEADs (Invitrogen, cat#61012). Briefly, 70 µl of Lysis/Binding Buffer and 10 µl of lysis buffer containing 3 µl of magnetic beads were added to the plate with cells. Plates were incubated on an electromagnetic shaker for 10 minutes at room temperature and then magnetic beads were captured and the supernatant was removed. Bead-bound RNA was then washed 2 times with 150 µl Wash Buffer A and once with Wash Buffer B. Beads were then washed with 150 µl Elution Buffer, re-captured and supernatant removed.

### cDNA Synthesis Using ABI High Capacity cDNA Reverse Transcription Kit (Applied Biosystems, Foster City, CA, Cat #4368813)

[0770] Ten µl of a master mix containing 1 µl 10X Buffer, 0.4 µl 25X dNTPs, 1 µl 10x Random primers, 0.5 µl Reverse Transcriptase, 0.5 µl RNase inhibitor and 6.6 µl of H2O per reaction was added to RNA isolated above. Plates were sealed, mixed, and incubated on an electromagnetic shaker for 10 minutes at room temperature, followed by 2 h 37° C.

### Real Time PCR

[0771] Two µl of cDNA and 5µl Lightcycler 480 probe master mix (Roche Cat # 04887301001) were added to either 0.5 µl of Human GAPDH TaqMan Probe (4326317E) and 0.5 µl MYOC Human probe per well in a 384 well plates (Roche cat # 04887301001). Real time PCR was done in a LightCycler480 Real Time PCR system (Roche). Each duplex was tested at least two times and data were normalized to cells transfected with a non-targeting control siRNA. To calculate relative fold change, real time data were analyzed using the ΔΔCt method and normalized to assays performed with cells transfected with a non-targeting control siRNA.

### Results

[0772] The results of the multi-dose screen in human trabecular meshwork cells (HTMC)) with three sets of exemplary human MYOC siRNAs are shown in Table 7A (correspond to siRNAs in Table 3A), Table 7B (correspond to siRNAs in Table 4A), and 7C (correspond to siRNAs in Table 5A). The multi-dose experiments were performed at 50 nM, 10 nM, 1 nM, and 0.1 nM final duplex concentrations and the data are expressed as percent message remaining relative to non-targeting control. Of the exemplary siRNA duplexes evaluated in Table 7A below, 13 achieved a knockdown of MYOC of ≥90%, 95 achieved a knockdown of MYOC of ≥ 60%, and 126 achieved a knockdown of MYOC of ≥ 20% in HTMC cells when administered at the 10 nM concentration. Of the exemplary siRNAs duplexes evaluated in Table 7B below, 15 achieved a knockdown of MYOC of >70%, 39 achieved a knockdown of MYOC of >50%, and 84 achieved a knockdown of MYOC of >20% in HTMC cells when administered at the 10 nM concentration. Of the exemplary siRNA duplexes evaluated in Table 7C below, 8 achieved a knockdown of MYOC of ≥70%, 29 achieved a knockdown of MYOC of ≥50%, and 66 achieved a knockdown of MYOC of >20% in HTMC cells when administered at the 10 nM concentration.

TABLE 7A

MYOC endogenous in vitro multi-dose screen with one set of exemplary human MYOC siRNAs

| Duplex Name | 50 nM | STDEV | 10 nM | STDEV | 1 nM | STDEV | 0.1 nM | STDEV |
|---|---|---|---|---|---|---|---|---|
| AD-954362.1 | 11.5 | 1.9 | 13.0 | 3.6 | 21.6 | 6.9 | 73.0 | 44.8 |
| AD-954363.1 | 25.7 | 3.9 | 16.6 | 8.0 | 43.4 | 17.6 | 43.5 | 14.2 |
| AD-954410.1 | 15.3 | 5.4 | 6.8 | 3.0 | 12.1 | 5.5 | 27.6 | 7.6 |
| AD-954411.1 | 15.0 | 6.8 | 31.6 | 35.6 | 25.5 | 11.0 | 62.9 | 25.2 |
| AD-954548.1 | 8.6 | 2.2 | N/A | N/A | 34.2 | 12.3 | 108.2 | 32.1 |
| AD-954684.1 | 13.2 | 1.2 | 33.6 | 13.3 | 79.9 | 50.0 | 100.2 | 37.0 |
| AD-954771.1 | 17.5 | 0.8 | 36.3 | 3.6 | 50.1 | 8.9 | 95.8 | 9.1 |
| AD-954772.1 | 10.5 | 4.4 | 31.1 | 8.6 | 35.0 | 12.7 | 91.8 | 4.5 |
| AD-954891.1 | 29.4 | 3.3 | 16.4 | 6.2 | 46.9 | 22.5 | 85.2 | 17.1 |
| AD-954892.1 | 17.0 | 6.2 | 45.4 | 11.8 | 47.9 | 16.0 | 88.6 | 25.2 |
| AD-954912.1 | 6.1 | 2.8 | 56.4 | 12.0 | N/A | N/A | 99.9 | 40.0 |
| AD-954913.1 | 8.2 | 2.7 | 5.9 | 3.4 | 21.4 | 16.5 | 43.3 | 5.2 |
| AD-954914.1 | 19.6 | 6.1 | 18.0 | 6.6 | 53.0 | 8.1 | 111.0 | 38.5 |
| AD-954915.1 | 13.8 | 2.6 | 15.1 | 6.5 | 46.6 | 16.1 | 73.8 | 42.5 |
| AD-954921.1 | 33.1 | 15.0 | 20.9 | 14.2 | 84.0 | 26.3 | 89.4 | 23.8 |
| AD-954934.1 | 40.8 | 4.3 | 49.2 | 16.5 | 34.5 | 14.9 | 100.7 | 33.3 |
| AD-954937.1 | 14.6 | 5.3 | 44.5 | 7.7 | 40.8 | 29.3 | 79.8 | 9.1 |
| AD-954939.1 | 5.5 | 1.4 | 22.8 | 9.4 | 12.8 | 4.4 | 63.6 | 12.5 |
| AD-954944.1 | 24.4 | 6.0 | 21.9 | 5.4 | 26.2 | 8.4 | 68.6 | 18.1 |
| AD-954951.1 | 64.1 | 15.6 | 46.1 | 12.6 | 75.2 | 18.9 | 125.7 | 31.5 |
| AD-954958.1 | 4.4 | 1.3 | 6.7 | 2.6 | 31.2 | 15.2 | 82.7 | 30.8 |
| AD-954964.1 | 90.1 | 16.4 | 109.7 | 38.5 | 121.5 | 36.2 | 133.2 | 37.4 |
| AD-954965.1 | 6.3 | 3.2 | 6.6 | 1.6 | 41.7 | 19.1 | 37.2 | 6.7 |
| AD-954966.1 | 32.3 | 14.0 | 37.1 | 21.7 | 90.7 | 42.4 | 89.9 | 29.4 |
| AD-954967.1 | 87.5 | 24.0 | 81.4 | 19.1 | 100.1 | 22.4 | 84.0 | 45.4 |
| AD-954968.1 | 14.1 | 3.0 | 30.7 | 8.1 | 55.6 | 18.9 | 61.4 | 8.6 |
| AD-954970.1 | 7.6 | 4.9 | 27.0 | 7.0 | 22.3 | 4.8 | 49.9 | 13.8 |
| AD-954992.1 | 16.0 | 4.5 | 53.7 | 26.7 | 40.3 | 14.3 | 93.2 | 22.6 |
| AD-954993.1 | 6.6 | 2.1 | 24.4 | 10.7 | 28.8 | 5.7 | 61.0 | 13.0 |
| AD-955030.1 | 15.0 | 2.9 | 13.6 | 9.9 | 22.5 | 7.1 | 57.4 | 31.9 |
| AD-955031.1 | 13.4 | 3.4 | 20.4 | 14.0 | 30.5 | 16.2 | 82.2 | 21.6 |
| AD-955032.1 | 4.4 | 2.1 | 16.0 | 12.0 | 22.7 | 4.3 | 71.6 | 16.8 |
| AD-955034.1 | 18.8 | 7.2 | 17.2 | 13.3 | N/A | N/A | 130.6 | 35.2 |
| AD-955035.1 | 10.0 | 2.1 | 10.0 | 6.3 | 34.3 | 9.4 | 83.1 | 33.4 |
| AD-955037.1 | 7.7 | 2.1 | 13.3 | 4.4 | 38.9 | 5.5 | 144.9 | 76.1 |
| AD-955074.1 | 6.9 | 5.9 | 14.6 | 8.4 | 20.9 | 4.6 | 51.6 | 13.2 |
| AD-955075.1 | 48.4 | 18.4 | 30.0 | 8.5 | 95.6 | 30.4 | 57.5 | 19.9 |
| AD-955082.1 | 43.5 | 0.6 | 27.3 | 15.3 | 38.8 | 18.0 | 53.0 | 31.2 |
| AD-955083.1 | 91.0 | 25.5 | 62.6 | 20.5 | 152.6 | 20.1 | 77.7 | 21.4 |
| AD-955084.1 | 5.3 | 3.1 | 17.7 | 9.7 | 26.0 | 11.5 | 73.0 | 19.6 |
| AD-955085.1 | 15.2 | 11.2 | 43.0 | 14.8 | 40.7 | 13.2 | 96.0 | 4.9 |
| AD-955086.1 | 35.8 | 26.3 | 60.5 | 7.7 | 46.3 | 15.3 | 75.3 | 30.6 |
| AD-955087.1 | 47.6 | 14.6 | 20.2 | 1.7 | 56.5 | 15.1 | 67.1 | 4.3 |
| AD-955097.1 | 10.3 | 1.7 | 10.1 | 1.8 | 46.6 | 8.0 | 139.1 | 44.3 |
| AD-955144.1 | 21.5 | 8.8 | 14.0 | 4.9 | 48.3 | 4.0 | 109.8 | 28.4 |
| AD-955146.1 | 6.8 | 1.6 | 33.7 | 10.3 | 37.8 | 21.4 | 82.1 | 48.6 |
| AD-955148.1 | 27.3 | 14.1 | 47.6 | 16.6 | 77.4 | 42.4 | 85.1 | 25.2 |
| AD-955165.1 | 62.1 | 16.6 | 109.0 | 19.7 | 90.5 | 36.0 | N/A | N/A |
| AD-955174.1 | 18.7 | 3.6 | 44.7 | 11.3 | 79.9 | 22.7 | 135.5 | 56.6 |
| AD-955175.1 | 5.2 | 2.1 | 8.2 | 2.8 | 16.1 | 8.6 | 91.9 | 28.5 |
| AD-955177.1 | 5.1 | 2.1 | 21.3 | 9.5 | 32.3 | 7.5 | N/A | N/A |
| AD-955193.1 | 19.5 | 7.4 | 30.2 | 11.7 | 28.9 | 5.0 | 93.6 | 19.7 |
| AD-955194.1 | 3.9 | 2.0 | 8.9 | 2.6 | 48.3 | 25.3 | 60.0 | 10.2 |
| AD-955196.1 | 98.0 | 17.3 | 43.0 | 13.9 | 89.5 | 35.5 | 78.8 | 25.2 |
| AD-955199.1 | 50.5 | 23.1 | 93.6 | 18.1 | 80.0 | 43.3 | 93.5 | 14.4 |
| AD-955200.1 | 9.9 | 5.1 | 13.8 | 7.4 | 46.8 | 1.8 | 62.8 | 6.5 |
| AD-955255.1 | 11.9 | 4.7 | 33.2 | 16.3 | 63.4 | 23.1 | 59.1 | 22.6 |
| AD-955266.1 | 4.9 | 2.0 | 6.3 | 0.8 | 12.2 | 1.7 | 34.1 | 9.2 |
| AD-955269.1 | 11.6 | 5.4 | 27.6 | 20.6 | 14.0 | 3.7 | 67.9 | 26.9 |
| AD-955270.1 | N/A | N/A | 23.4 | 8.5 | 21.1 | 4.9 | 44.4 | 15.1 |
| AD-955271.1 | 68.7 | 11.2 | 63.0 | 12.0 | 56.9 | 13.2 | 73.8 | 29.5 |
| AD-955272.1 | 12.7 | 9.4 | 21.9 | 12.0 | 35.0 | 9.7 | 62.7 | 14.2 |
| AD-955281.1 | 7.7 | 3.6 | 38.4 | 17.8 | 34.7 | 10.6 | 71.7 | 12.7 |
| AD-955282.1 | 5.9 | 2.3 | 13.6 | 4.5 | 30.6 | 22.7 | 60.4 | 13.2 |
| AD-955283.1 | 18.0 | 9.2 | 12.5 | 1.4 | 46.1 | 14.1 | 93.9 | 15.6 |
| AD-955292.1 | 74.8 | 20.6 | 48.2 | 31.9 | 74.5 | 20.7 | 110.6 | 32.3 |
| AD-955293.1 | 4.2 | 1.5 | 20.0 | 13.3 | 31.6 | 11.3 | 97.7 | 34.2 |
| AD-955308.1 | 59.5 | 15.4 | 88.1 | 33.2 | 82.0 | 25.2 | 89.8 | 26.8 |
| AD-955309.1 | 7.8 | 1.2 | 28.1 | 11.4 | 40.4 | 11.6 | 72.7 | 39.4 |
| AD-955310.1 | 44.7 | 6.4 | 50.4 | 12.9 | 61.9 | 37.4 | 80.4 | 15.7 |
| AD-955343.1 | 6.5 | 2.4 | 7.4 | 2.9 | 45.2 | 13.7 | 73.8 | 8.2 |
| AD-955344.1 | 16.8 | 7.2 | 36.4 | 27.6 | 60.7 | 14.6 | 62.0 | 15.9 |
| AD-955345.1 | 12.1 | 3.4 | 47.8 | 15.1 | 70.1 | 46.7 | 83.7 | 16.4 |
| AD-955346.1 | 17.8 | 5.8 | 15.2 | 2.7 | 28.6 | 4.1 | 89.1 | 35.7 |
| AD-955385.1 | 35.6 | 15.0 | 29.9 | 15.4 | 35.7 | 25.2 | 65.8 | 27.7 |
| AD-955386.1 | 7.4 | 2.6 | 13.2 | 3.1 | 68.9 | 39.2 | 123.3 | 39.3 |
| AD-955387.1 | 123.3 | 44.5 | 104.3 | 42.5 | 73.1 | 33.0 | 100.2 | 28.7 |
| AD-955415.1 | 11.9 | 4.7 | 11.9 | 6.2 | 19.1 | 4.9 | 61.4 | 21.9 |
| AD-955427.1 | 12.0 | 4.8 | 9.1 | 4.1 | 26.1 | 9.8 | 116.9 | 32.5 |
| AD-955504.1 | 12.7 | 5.0 | 12.8 | 6.2 | 35.6 | 19.7 | 123.4 | 50.1 |
| AD-955570.1 | 5.4 | 2.7 | 11.1 | 4.1 | N/A | N/A | 39.4 | 8.2 |
| AD-955571.1 | 6.1 | 3.3 | N/A | N/A | 10.6 | 7.3 | 48.1 | 6.5 |
| AD-955572.1 | 7.4 | 2.2 | 9.6 | 3.9 | 17.9 | 4.7 | 37.1 | 8.5 |
| AD-955586.1 | 56.4 | 14.3 | 33.0 | 8.6 | 59.0 | 12.2 | 114.2 | 19.0 |
| AD-955612.1 | 96.5 | 28.6 | 62.7 | 17.7 | 59.7 | 32.0 | 88.3 | 43.2 |
| AD-955615.1 | 9.4 | 2.7 | 18.3 | 8.0 | 48.9 | 54.5 | 72.9 | 30.6 |
| AD-955617.1 | 35.8 | 10.7 | 53.3 | 25.3 | 75.5 | 10.5 | 86.4 | 18.4 |
| AD-955620.1 | 116.1 | 31.9 | 77.3 | 16.9 | 60.4 | 14.1 | 138.2 | 53.3 |
| AD-955621.1 | 15.0 | 4.0 | 11.9 | 4.1 | 24.1 | 7.8 | 0.0 | N/A |
| AD-955641.1 | 5.4 | 3.1 | 24.6 | 5.8 | 60.2 | 49.7 | 51.7 | 23.4 |
| AD-955642.1 | 20.4 | 5.9 | 26.5 | 6.7 | 30.2 | 11.0 | 95.4 | 16.3 |
| AD-955644.1 | 5.0 | 3.9 | 9.3 | 4.0 | 19.2 | 8.7 | 55.0 | 17.0 |
| AD-955664.1 | 14.4 | 7.0 | 10.6 | 2.1 | 49.7 | 25.6 | 67.0 | 20.2 |
| AD-955668.1 | 10.4 | 5.9 | 8.4 | 3.1 | 15.5 | 9.8 | 27.2 | 6.2 |
| AD-955669.1 | 14.1 | 22.2 | 11.0 | 4.3 | 10.9 | 1.1 | 24.6 | 4.5 |
| AD-955682.1 | 79.1 | 41.0 | 63.8 | 20.8 | 69.0 | 10.6 | 57.4 | 34.1 |
| AD-955702.1 | 17.6 | 2.5 | 27.1 | 7.8 | 12.2 | 4.5 | 31.9 | 14.5 |
| AD-955703.1 | 11.1 | 2.6 | 12.2 | 6.3 | 47.2 | 17.7 | 126.1 | 19.2 |
| AD-955851.1 | 3.9 | 1.3 | 20.6 | 11.1 | 17.2 | 1.6 | 35.0 | 12.3 |
| AD-955886.1 | 36.4 | 16.2 | 32.2 | 5.9 | 28.7 | 11.0 | 35.1 | 8.9 |
| AD-955887.1 | 41.3 | 10.9 | 46.6 | 22.5 | 33.0 | 13.1 | 60.8 | 17.8 |
| AD-955888.1 | 26.6 | 8.4 | 80.7 | 24.3 | 43.3 | 15.5 | 69.5 | 17.5 |
| AD-955889.1 | 23.3 | 13.5 | 46.3 | 2.2 | 67.4 | 31.0 | 46.3 | 8.9 |
| AD-955891.1 | 18.3 | 5.2 | 41.2 | 9.2 | 30.3 | 8.4 | 38.4 | 7.8 |
| AD-955892.1 | 41.1 | 7.1 | 29.4 | 13.4 | 72.4 | 29.1 | 64.6 | 6.2 |
| AD-955899.1 | 19.7 | 2.7 | 61.4 | 23.1 | 25.9 | 4.9 | 66.8 | 37.8 |
| AD-955900.1 | N/A | N/A | 27.4 | 16.2 | 44.6 | 16.5 | 53.9 | 6.3 |
| AD-955901.1 | N/A | N/A | 19.1 | 7.3 | 23.3 | 3.8 | 55.6 | 16.0 |
| AD-955908.1 | 21.0 | 7.4 | 57.9 | 15.8 | 26.5 | 6.8 | 26.9 | 8.9 |
| AD-955917.1 | 22.9 | 5.7 | 22.2 | 5.9 | 24.4 | 5.6 | 30.9 | 7.9 |
| AD-955918.1 | 23.6 | 1.9 | 30.1 | 9.4 | 27.5 | 16.4 | 52.6 | 13.1 |
| AD-955919.1 | 23.4 | 3.3 | 21.2 | 1.1 | 21.1 | 11.1 | 31.2 | 7.9 |
| AD-955920.1 | 25.7 | 10.6 | 32.6 | 14.5 | 22.5 | 10.8 | 32.8 | 25.7 |
| AD-955921.1 | 20.5 | 3.6 | 36.1 | 11.9 | 21.4 | 3.0 | 36.7 | 12.4 |
| AD-955922.1 | 21.4 | 6.8 | 47.9 | 9.8 | 25.4 | 3.6 | 34.6 | 5.7 |
| AD-955923.1 | 25.5 | 10.6 | 28.7 | 6.4 | 19.7 | 7.4 | 30.5 | 7.4 |
| AD-955924.1 | 38.9 | 9.4 | 28.6 | 14.0 | 19.0 | 3.6 | 59.9 | 6.9 |
| AD-955927.1 | 29.3 | 7.0 | 26.4 | 6.2 | 24.1 | 10.9 | 55.3 | 16.4 |
| AD-955962.1 | 19.8 | 3.5 | 44.1 | 4.8 | 35.8 | 6.5 | 82.5 | 28.3 |
| AD-955963.1 | 23.6 | 9.6 | 26.0 | 6.4 | 45.1 | 4.5 | 34.6 | 5.8 |
| AD-955969.1 | 27.4 | 9.3 | 39.3 | 10.8 | 22.0 | 5.5 | 21.0 | 3.5 |
| AD-955970.1 | 24.2 | 7.7 | 35.9 | 18.3 | 29.7 | 8.9 | 24.8 | 7.3 |
| AD-955971.1 | N/A | N/A | 40.7 | 8.5 | 34.5 | 5.5 | 41.9 | 2.9 |
| AD-955979.1 | 28.4 | 11.3 | 32.3 | 15.7 | 32.4 | 7.8 | 103.2 | 19.0 |
| AD-955980.1 | 24.2 | 11.2 | 33.0 | 3.3 | N/A | N/A | 28.2 | 5.5 |
| AD-956010.1 | 18.4 | 11.7 | 36.4 | 11.3 | 26.8 | 12.3 | 29.2 | 11.3 |
| AD-956011.1 | 16.5 | 3.0 | 19.6 | 2.2 | 20.9 | 10.7 | 63.4 | 15.5 |
| AD-956021.1 | 21.0 | 2.7 | 34.1 | 19.4 | 39.4 | 14.1 | 94.3 | 38.3 |
| AD-956022.1 | 27.1 | 6.2 | 42.8 | 7.7 | 46.0 | 6.3 | 61.0 | 12.2 |
| AD-956063.1 | 37.2 | 23.3 | 22.9 | 7.5 | 19.7 | 10.5 | 32.6 | 5.5 |
| AD-956079.1 | 27.1 | 9.9 | 38.2 | 14.6 | 30.8 | 4.7 | 80.2 | 19.1 |
| AD-956087.1 | 28.4 | 10.6 | 64.8 | 26.0 | 65.3 | 53.8 | 102.9 | 34.8 |
| AD-956092.1 | 23.6 | 2.9 | 16.8 | 2.5 | 26.9 | 7.5 | 37.7 | 15.3 |
| AD-956096.1 | 20.3 | 4.5 | 25.2 | 16.4 | 33.9 | 1.7 | 34.7 | 7.4 |
| AD-956099.1 | 27.4 | 1.1 | 51.5 | 8.7 | 27.1 | 5.1 | 55.4 | 18.0 |

TABLE 7B

MYOC endogenous in vitro multi-dose screen with one set of exemplary human MYOC siRNAs

| Duplex Name | 50 nM | STDEV | 10 nM | STDEV | 1 nM | STDEV | 0.1 nM | STDEV |
|---|---|---|---|---|---|---|---|---|
| AD-956571.1 | 187.3 | 27.1 | 135.0 | 32.3 | 148.6 | 36.9 | 117.4 | 63.9 |
| AD-956690.1 | 59.3 | 23.1 | 71.4 | 28.5 | 87.1 | 26.5 | 76.6 | 19.0 |
| AD-956709.1 | 65.7 | 37.2 | 66.6 | 11.2 | 141.9 | 49.6 | 89.7 | 25.3 |
| AD-956710.1 | 13.2 | 3.0 | 26.8 | 11.5 | 52.5 | 5.7 | 87.9 | 27.3 |
| AD-956732.1 | 42.3 | 9.4 | 57.6 | 23.7 | 124.6 | 33.6 | 86.9 | 16.2 |
| AD-956741.1 | 150.0 | 63.6 | 151.0 | 40.6 | 178.4 | 42.4 | 105.1 | 7.8 |
| AD-956744.1 | 77.3 | 33.6 | 73.4 | 20.0 | 151.8 | 92.5 | 66.9 | 25.0 |
| AD-956745.1 | 76.5 | 8.2 | 95.3 | 32.3 | 82.8 | 7.4 | 78.3 | 34.6 |
| AD-956746.1 | 74.1 | 26.9 | 95.8 | 25.0 | 117.7 | 22.8 | 125.7 | 53.8 |
| AD-956747.1 | 39.8 | 3.4 | 19.5 | 8.0 | 67.4 | 14.8 | 113.3 | 22.2 |
| AD-956748.1 | 138.3 | 73.1 | 117.3 | 30.2 | 129.2 | 14.0 | 82.3 | 38.6 |
| AD-956749.1 | 153.7 | 73.4 | 104.8 | 20.3 | 138.3 | 34.5 | 95.9 | 36.9 |
| AD-956760.1 | 15.6 | 5.4 | 20.6 | 7.3 | 50.2 | 8.6 | 61.1 | 5.5 |
| AD-956761.1 | 61.3 | 9.5 | 101.8 | 38.3 | 73.6 | 16.8 | 47.5 | 12.0 |
| AD-956762.1 | 59.9 | 13.3 | 61.6 | 25.4 | 154.3 | 17.9 | 93.0 | 24.4 |
| AD-956763.1 | 33.5 | 14.4 | 29.1 | 5.3 | 78.1 | 20.3 | 103.8 | 24.9 |
| AD-956764.1 | 47.1 | 19.2 | 27.3 | 7.7 | 137.0 | 30.6 | 97.1 | 22.2 |
| AD-956765.1 | 76.9 | 22.9 | 154.4 | 18.8 | 134.2 | 51.7 | 51.8 | 42.2 |
| AD-956766.1 | 97.0 | 39.2 | 130.1 | 32.3 | 145.7 | 38.6 | 65.9 | 48.1 |
| AD-956769.1 | 20.0 | 10.7 | 32.4 | 13.4 | 110.3 | 28.2 | 71.8 | 50.3 |
| AD-956827.1 | 77.9 | 16.5 | 143.9 | 31.8 | 130.6 | 34.7 | 82.7 | 22.8 |
| AD-956828.1 | 86.5 | 25.8 | 135.7 | 45.3 | 132.5 | 28.6 | 147.1 | 28.5 |
| AD-956831.1 | 57.8 | 28.4 | 27.9 | 8.6 | 71.9 | 13.7 | 132.5 | 51.8 |
| AD-956872.1 | 41.8 | 13.3 | 84.2 | 16.4 | 82.3 | 19.3 | 120.1 | 34.2 |
| AD-956873.1 | 56.9 | 16.7 | 99.8 | 26.7 | 107.5 | 30.0 | 58.5 | 24.0 |
| AD-956874.1 | 10.7 | 2.5 | 25.7 | 5.7 | 69.7 | 3.1 | 76.8 | 60.3 |
| AD-956877.1 | 101.5 | 58.1 | 130.3 | 69.5 | 172.4 | 45.3 | 97.6 | 11.0 |
| AD-956880.1 | 30.0 | 8.8 | 48.6 | 15.5 | 72.1 | 24.9 | 106.0 | 44.0 |
| AD-956881.1 | 64.9 | 12.6 | 102.1 | 28.7 | 125.7 | 27.7 | 49.6 | 11.6 |
| AD-956887.1 | 69.2 | 26.0 | 114.1 | 46.0 | 159.3 | 48.1 | 149.5 | 59.6 |
| AD-956947.1 | 165.2 | 85.3 | 96.4 | 29.8 | 124.3 | 44.7 | 95.8 | 38.3 |
| AD-956949.1 | 17.9 | 4.0 | 48.7 | 20.8 | 131.6 | 15.6 | 100.6 | 11.2 |
| AD-956958.1 | 68.2 | 31.1 | 148.6 | 45.9 | 130.1 | 22.6 | 99.9 | 53.5 |
| AD-956967.1 | 85.3 | 12.1 | 95.6 | 45.8 | 113.3 | 34.9 | 36.5 | 17.9 |
| AD-956968.1 | 102.9 | 58.4 | 124.5 | 75.9 | 155.6 | 67.4 | 54.5 | 9.6 |
| AD-956992.1 | 37.8 | 28.5 | 85.9 | 32.5 | 111.8 | 19.5 | 88.3 | 22.8 |
| AD-956998.1 | 155.6 | 52.0 | 119.7 | 56.1 | 196.7 | 45.4 | 149.4 | 48.3 |
| AD-956999.1 | 88.8 | 23.5 | 54.3 | 17.8 | 62.6 | 13.5 | 66.8 | 49.8 |
| AD-957000.1 | 12.8 | 5.3 | 44.4 | 16.8 | 53.0 | 18.1 | 73.1 | 6.9 |
| AD-957063.1 | 51.2 | 20.3 | 51.6 | 26.7 | 128.5 | 48.8 | 62.3 | 15.0 |
| AD-957064.1 | 22.5 | 21.3 | 37.1 | 21.9 | 87.3 | 47.1 | 149.0 | 57.8 |
| AD-957065.1 | 28.5 | 9.2 | 31.1 | 19.1 | 68.3 | 34.4 | 120.1 | 65.6 |
| AD-957068.1 | 26.0 | 11.2 | 40.1 | 18.6 | 89.4 | 15.9 | 38.5 | 8.8 |
| AD-957069.1 | 34.2 | 23.8 | 81.6 | 16.4 | 67.0 | 21.7 | 95.5 | 23.7 |
| AD-957070.1 | 68.8 | 43.2 | 113.0 | 43.6 | 174.7 | 57.6 | 95.4 | 13.1 |
| AD-957071.1 | 31.2 | 3.1 | 27.5 | 17.6 | 69.1 | 21.9 | 27.3 | 18.7 |
| AD-957073.1 | 55.6 | 3.3 | 58.5 | 18.5 | 114.4 | 35.3 | 61.7 | 33.5 |
| AD-957079.1 | 88.8 | 25.5 | 92.8 | 27.2 | 98.6 | 35.6 | 104.4 | 40.5 |
| AD-957081.1 | 66.6 | 28.7 | 41.2 | 25.7 | 85.1 | 40.1 | 38.6 | 35.4 |
| AD-957083.1 | 110.7 | 22.9 | 113.2 | 33.0 | 161.2 | 37.1 | 96.6 | 21.3 |
| AD-957141.1 | 202.7 | 25.2 | 163.2 | 72.3 | 168.8 | 93.0 | 69.7 | 9.0 |
| AD-957142.1 | 152.6 | 27.0 | 198.4 | 48.8 | 185.4 | 26.2 | 70.6 | 20.1 |
| AD-957144.1 | 111.7 | 27.4 | 121.7 | 35.8 | 165.8 | 30.1 | 102.8 | 15.9 |
| AD-957368.1 | 7.6 | 4.0 | 12.6 | 6.4 | 30.2 | 13.7 | 94.3 | 60.5 |
| AD-957369.1 | 20.6 | 4.8 | 36.6 | 18.3 | 79.3 | 14.3 | 119.7 | 30.3 |
| AD-957370.1 | 37.4 | 9.2 | 58.9 | 16.1 | 106.1 | 40.5 | 95.4 | 13.6 |
| AD-957371.1 | 26.9 | 15.7 | 43.0 | 16.5 | 57.9 | 14.7 | 83.8 | 28.4 |
| AD-957439.1 | 62.1 | 7.5 | 68.3 | 8.8 | 93.9 | 12.8 | 67.7 | 33.0 |
| AD-957440.1 | 43.1 | 17.2 | 40.4 | 8.8 | 65.6 | 27.0 | 79.3 | 29.4 |
| AD-957443.1 | 8.3 | 3.3 | 9.5 | 3.4 | 37.6 | 15.0 | 16.9 | 11.3 |
| AD-957465.1 | 208.7 | 43.8 | 177.3 | 53.6 | 137.0 | 29.1 | 106.3 | 25.6 |
| AD-957479.1 | 15.9 | 4.5 | 12.7 | 9.2 | 40.9 | 17.3 | 55.8 | 16.0 |
| AD-957480.1 | 53.1 | 17.3 | 58.0 | 17.2 | 79.3 | 26.0 | 82.6 | 22.7 |
| AD-957481.1 | 53.4 | 17.5 | 82.2 | 28.0 | 86.1 | 15.6 | 42.0 | 27.1 |
| AD-957482.1 | 81.4 | 22.5 | 143.3 | 17.6 | 123.3 | 21.5 | 86.3 | 19.3 |
| AD-957487.1 | 85.5 | 32.4 | 49.2 | 7.9 | 114.7 | 26.2 | 145.7 | 59.1 |
| AD-957488.1 | 78.3 | 27.8 | 42.5 | 9.8 | 98.6 | 20.6 | 113.6 | 19.1 |
| AD-957489.1 | 79.4 | 26.0 | 55.6 | 15.4 | 77.1 | 25.2 | 30.6 | 13.6 |
| AD-957490.1 | 143.4 | 23.8 | 154.2 | 21.3 | 189.5 | 54.4 | 154.2 | 54.5 |
| AD-957500.1 | 129.9 | 43.0 | 199.7 | 72.2 | 147.2 | 51.8 | 89.1 | 32.7 |
| AD-957506.1 | 14.1 | 5.3 | 46.5 | 22.7 | 95.2 | 23.2 | 117.8 | 14.3 |
| AD-957508.1 | 47.3 | 22.5 | 60.8 | 25.2 | 110.1 | 26.0 | 93.4 | 5.0 |
| AD-957650.1 | 34.9 | 17.2 | 51.7 | 16.2 | 86.4 | 24.0 | 98.6 | 19.5 |
| AD-957685.1 | 180.4 | 87.9 | 159.7 | 65.1 | 132.2 | 47.0 | 134.4 | 26.5 |
| AD-957686.1 | 55.4 | 1.4 | 85.6 | 45.3 | 102.8 | 18.7 | 139.5 | 63.5 |
| AD-957687.1 | 62.4 | 16.8 | 46.3 | 23.3 | 113.3 | 32.1 | 114.8 | 43.6 |
| AD-957688.1 | 79.7 | 14.7 | 126.0 | 34.7 | 115.3 | 21.0 | 84.7 | 16.3 |
| AD-957690.1 | 22.8 | 4.9 | 54.4 | 21.1 | 67.7 | 34.4 | 91.7 | 11.3 |
| AD-957691.1 | 174.6 | 30.6 | 167.1 | 56.6 | 118.6 | 34.7 | 34.9 | 14.4 |
| AD-957694.1 | 68.2 | 75.4 | 64.5 | 38.8 | 89.7 | 31.7 | 82.5 | 23.2 |
| AD-957695.1 | 58.0 | 28.1 | 113.0 | 46.7 | 159.8 | 15.8 | 107.7 | 26.2 |
| AD-957696.1 | 45.3 | 9.9 | 79.2 | 10.9 | 92.2 | 11.2 | 99.7 | 33.5 |
| AD-957698.1 | 51.1 | 11.2 | 24.3 | 9.6 | 60.6 | 25.8 | 100.8 | 41.6 |
| AD-957699.1 | 83.3 | 19.9 | 123.4 | 28.7 | 88.6 | 29.4 | 28.1 | 16.3 |
| AD-957706.1 | 60.1 | 33.5 | 45.6 | 28.3 | 73.5 | 26.3 | 38.1 | 44.2 |
| AD-957707.1 | 36.7 | 14.8 | 62.8 | 4.0 | 83.5 | 42.5 | 50.2 | 13.8 |
| AD-957708.1 | 26.1 | 1.7 | 51.0 | 31.7 | 72.9 | 11.7 | 86.4 | 13.2 |
| AD-957710.1 | 62.5 | 23.6 | 58.3 | 17.0 | 49.6 | 8.3 | 34.7 | 29.4 |
| AD-957711.1 | 19.3 | 6.9 | 62.8 | 14.5 | 67.1 | 18.1 | 80.2 | 24.9 |
| AD-957716.1 | 35.2 | 8.1 | 77.8 | 49.1 | 152.6 | 43.9 | 119.4 | 33.5 |
| AD-957717.1 | 27.8 | 16.4 | 58.2 | 18.0 | 104.0 | 50.6 | 134.8 | 29.6 |
| AD-957718.1 | 8.3 | 3.4 | 28.2 | 10.8 | 39.0 | 15.0 | 60.0 | 14.0 |
| AD-957719.1 | 21.3 | 9.7 | 76.4 | 12.5 | 82.3 | 33.9 | 87.7 | 14.2 |
| AD-957720.1 | 24.0 | 4.8 | 63.9 | 18.5 | 77.4 | 27.4 | 59.7 | 18.6 |
| AD-957721.1 | 21.8 | 8.9 | 71.8 | 18.2 | 76.9 | 17.3 | 82.3 | 16.8 |
| AD-957722.1 | 50.8 | 43.4 | 52.2 | 29.3 | 105.7 | 36.8 | 108.8 | 34.3 |
| AD-957723.1 | 44.1 | 26.0 | 73.5 | 20.8 | 104.2 | 55.1 | 105.1 | 16.7 |
| AD-957725.1 | 24.9 | 4.4 | 36.8 | 8.1 | 96.5 | 49.2 | 120.4 | 22.5 |
| AD-957748.1 | 31.3 | 4.6 | 33.4 | 14.2 | 69.2 | 27.0 | 25.7 | 11.2 |
| AD-957753.1 | 26.6 | 10.3 | 104.4 | 36.9 | 55.4 | 20.4 | 73.8 | 27.6 |
| AD-957754.1 | 43.4 | 20.9 | 44.0 | 12.2 | 147.7 | 42.2 | 80.4 | 7.2 |
| AD-957756.1 | 54.3 | 34.6 | 51.6 | 15.0 | 83.6 | 13.1 | 85.0 | 23.9 |
| AD-957761.1 | 28.1 | 6.2 | 27.4 | 8.0 | 43.3 | 14.0 | 71.9 | 24.8 |
| AD-957762.1 | 79.8 | 25.1 | 74.0 | 53.0 | 57.3 | 17.1 | 44.2 | 20.4 |
| AD-957764.1 | 25.7 | 11.1 | 22.6 | 4.7 | 46.9 | 5.7 | 60.4 | 10.9 |
| AD-957765.1 | 24.3 | 6.3 | 67.5 | 37.0 | 70.3 | 31.8 | 99.1 | 16.5 |
| AD-957766.1 | 23.5 | 6.3 | 54.4 | 7.4 | 46.9 | 10.9 | 64.6 | 11.9 |
| AD-957767.1 | 39.9 | 10.1 | 40.1 | 12.9 | 119.4 | 24.3 | 97.0 | 8.8 |
| AD-957768.1 | 35.4 | 13.0 | 73.2 | 26.4 | 34.0 | 3.0 | 122.1 | 11.7 |
| AD-957769.1 | 26.7 | 20.6 | 50.0 | 9.1 | 83.8 | 19.9 | 99.4 | 27.4 |
| AD-957770.1 | 56.5 | 27.7 | 82.4 | 37.1 | N/A | N/A | 116.8 | 29.8 |
| AD-957771.1 | 94.7 | 27.9 | 99.4 | 15.2 | 107.0 | 9.0 | 113.6 | 62.6 |
| AD-957772.1 | 26.6 | 8.9 | 53.4 | 18.7 | 98.3 | 15.8 | 76.9 | 49.9 |
| AD-957773.1 | 24.5 | 13.0 | 67.1 | 26.3 | 52.6 | 14.4 | 91.7 | 38.4 |
| AD-957774.1 | 92.9 | 25.8 | 96.1 | 53.1 | 113.0 | 34.9 | 138.7 | 49.3 |
| AD-957775.1 | 36.1 | 15.0 | 65.0 | 8.2 | 53.8 | 10.0 | 100.1 | 22.0 |
| AD-957776.1 | 70.3 | 19.0 | 85.3 | 24.2 | 64.5 | 25.8 | 79.9 | 42.1 |
| AD-957777.1 | 91.3 | 33.0 | 74.5 | 10.2 | 50.5 | 19.1 | 80.7 | 16.8 |
| AD-957808.1 | 55.7 | 21.3 | 83.6 | 35.2 | 79.7 | 57.6 | 92.8 | 21.4 |
| AD-957809.1 | 30.7 | 26.7 | 91.6 | 25.1 | 103.3 | 35.0 | 168.9 | 21.7 |
| AD-957810.1 | 30.1 | 4.3 | 77.4 | 25.5 | 141.2 | 27.7 | 132.4 | 24.4 |
| AD-957811.1 | 22.2 | 3.3 | 63.7 | 2.7 | 98.6 | 35.2 | 109.4 | 37.2 |
| AD-957819.1 | 38.8 | 14.7 | 120.7 | 21.9 | 113.3 | 24.2 | 81.4 | 31.1 |
| AD-957820.1 | 52.2 | 23.5 | 65.3 | 49.1 | 92.5 | 42.3 | 110.4 | 15.4 |
| AD-957821.1 | 24.3 | 3.5 | 42.3 | 13.8 | 65.1 | 8.7 | 72.0 | 7.1 |
| AD-957862.1 | 53.3 | 12.7 | 92.2 | 35.6 | 43.7 | 15.9 | 70.2 | 24.6 |
| AD-957883.1 | 35.1 | 3.1 | 69.0 | 22.5 | 91.7 | 23.0 | 88.6 | 12.2 |
| AD-957887.1 | 20.4 | 4.1 | 60.2 | 21.8 | 97.1 | 48.8 | 110.4 | 24.3 |
| AD-957889.1 | 36.7 | 15.9 | 66.9 | 36.8 | 52.8 | 24.6 | 86.5 | 14.0 |
| AD-957890.1 | 30.3 | 13.5 | 60.5 | 15.0 | 103.2 | 27.6 | 92.8 | 23.3 |
| AD-957894.1 | 72.4 | 29.5 | 70.2 | 26.1 | 62.0 | 37.6 | 91.5 | 37.3 |
| AD-957895.1 | 28.6 | 2.9 | 48.5 | 15.5 | 70.7 | 16.3 | 79.8 | 19.0 |
| AD-957897.1 | 26.8 | 8.0 | 42.0 | 17.7 | 78.0 | 12.8 | 71.0 | 28.1 |
| AD-957898.1 | 54.3 | 10.8 | 105.6 | 60.0 | 63.8 | 22.2 | 77.7 | 31.6 |

TABLE 7C

MYOC endogenous in vitro multi-dose screen with one set of exemplary human MYOC siRNAs

| Duplex Name | 50 nM | STDEV | 10 nM | STDEV | 1 nM | STDEV | 0.1 nM | STDEV |
|---|---|---|---|---|---|---|---|---|
| AD-957960.1 | 39.74 | 10.67 | 47.81 | 10.35 | 95.21 | 25.82 | 113.49 | 43.37 |
| AD-957961.1 | 92.59 | 22.93 | 109.23 | 35.30 | 171.11 | 90.04 | 117.61 | 36.07 |
| AD-958008.1 | 21.23 | 12.27 | 42.69 | 11.36 | 67.22 | 11.77 | 101.62 | 18.48 |
| AD-958009.1 | 24.28 | 15.78 | 63.05 | 42.09 | 72.96 | 36.89 | 134.46 | 21.04 |
| AD-958145.1 | 55.02 | 13.88 | 71.52 | 18.23 | 70.22 | 25.72 | 162.68 | 40.57 |
| AD-958368.1 | 92.55 | 7.32 | 141.25 | 52.40 | 135.84 | 65.32 | 125.44 | 40.35 |
| AD-958369.1 | 53.49 | 11.87 | 91.66 | 15.25 | 125.43 | 56.07 | 121.87 | 15.99 |
| AD-958488.1 | 62.72 | 15.90 | 77.83 | 44.95 | 104.61 | 19.79 | 96.47 | 42.54 |
| AD-958489.1 | 175.65 | 78.50 | 116.17 | 49.03 | 113.48 | 32.80 | 128.13 | 40.57 |
| AD-958509.1 | 75.96 | 24.71 | 44.52 | 20.72 | 113.16 | 37.35 | 96.90 | 46.44 |
| AD-958510.1 | 92.42 | 17.23 | 122.36 | 73.62 | 131.05 | 50.81 | 118.37 | 28.08 |
| AD-958511.1 | 117.40 | 43.28 | 81.63 | 30.38 | 83.47 | 29.94 | 99.53 | 21.47 |
| AD-958512.1 | 109.97 | 43.90 | 85.97 | 35.41 | 74.55 | 22.02 | 156.40 | 51.63 |
| AD-958518.1 | 110.19 | 64.25 | 102.56 | 37.85 | 80.13 | 32.06 | 100.48 | 26.38 |
| AD-958532.1 | 120.16 | 49.12 | 61.59 | 16.45 | 76.03 | 32.02 | 102.46 | 22.31 |
| AD-958539.1 | 164.44 | 22.51 | 121.87 | 44.66 | 109.01 | 25.98 | 110.97 | 16.17 |
| AD-958548.1 | 100.43 | 31.53 | 146.74 | 41.68 | 122.19 | 27.32 | 105.22 | 32.57 |
| AD-958555.1 | 108.40 | 13.45 | 135.09 | 23.34 | 71.24 | 14.50 | 118.60 | 48.96 |
| AD-958561.1 | 114.82 | 18.95 | 77.34 | 8.20 | 107.55 | 31.69 | 71.54 | 28.22 |
| AD-958563.1 | 108.44 | 26.42 | 113.06 | 23.27 | 172.35 | 58.28 | 92.33 | 20.25 |
| AD-958564.1 | 123.82 | 27.68 | 102.59 | 33.45 | 164.60 | 30.95 | 170.11 | 41.15 |
| AD-958565.1 | 106.79 | 24.06 | 99.04 | 15.20 | 128.37 | 26.17 | 150.80 | 19.24 |
| AD-958566.1 | 21.44 | 5.64 | 72.84 | 35.87 | 96.12 | 30.26 | 133.83 | 38.28 |
| AD-958568.1 | 20.38 | 2.39 | 26.83 | 12.98 | 45.88 | 23.23 | N/A | N/A |
| AD-958628.1 | 25.85 | 8.86 | 57.88 | 46.88 | N/A | N/A | 111.03 | 13.08 |
| AD-958629.1 | 28.11 | 16.12 | 78.84 | 17.25 | 110.93 | 53.17 | 118.05 | 32.05 |
| AD-958630.1 | 35.40 | 12.17 | 78.44 | 20.80 | 160.16 | 47.09 | 171.52 | 19.96 |
| AD-958632.1 | 27.47 | 11.44 | 33.39 | 14.38 | 75.93 | 25.72 | 98.96 | 12.39 |
| AD-958633.1 | 153.68 | 30.11 | 87.19 | 11.74 | 93.00 | 33.17 | 126.18 | 49.36 |
| AD-958635.1 | 97.78 | 58.58 | 99.40 | 41.86 | N/A | N/A | 128.17 | 26.96 |
| AD-958671.1 | 18.75 | 4.87 | 20.88 | 8.34 | 54.18 | 25.47 | 87.76 | 22.06 |
| AD-958672.1 | 30.11 | 22.25 | 29.16 | 13.38 | 95.12 | 28.64 | 67.65 | 42.43 |
| AD-958680.1 | 62.32 | 17.81 | 62.79 | 12.72 | 100.85 | 14.06 | 113.17 | 37.91 |
| AD-958681.1 | 109.77 | 21.92 | N/A | N/A | 187.33 | 89.10 | N/A | N/A |
| AD-958682.1 | 69.82 | 11.87 | 133.92 | 44.11 | 175.36 | 70.63 | 144.12 | 69.30 |
| AD-958683.1 | 95.93 | 34.03 | 150.63 | 37.31 | 172.75 | 64.92 | 102.35 | 28.28 |
| AD-958684.1 | 64.01 | 29.72 | 54.09 | 9.33 | 110.13 | 29.77 | 149.44 | 39.41 |
| AD-958685.1 | 70.54 | 32.15 | 132.38 | 37.46 | 84.45 | 24.88 | 96.75 | 26.06 |
| AD-958695.1 | 84.42 | 36.18 | 97.12 | 32.11 | 61.62 | 12.77 | 105.58 | 6.70 |
| AD-958742.1 | 176.38 | 47.57 | 159.44 | 27.09 | 88.07 | 32.75 | 112.34 | 31.07 |
| AD-958757.1 | 59.19 | 26.61 | 117.65 | 31.99 | 124.14 | 41.68 | 113.14 | 24.19 |
| AD-958767.1 | 114.91 | 52.45 | 182.69 | 46.49 | 101.86 | 22.89 | 154.34 | 42.70 |
| AD-958768.1 | 60.21 | 11.95 | 53.14 | 19.38 | 116.72 | 18.73 | 128.84 | 7.84 |
| AD-958770.1 | 68.45 | 22.27 | 112.00 | 48.55 | 81.96 | 19.53 | 122.72 | 19.77 |
| AD-958786.1 | 153.59 | 40.37 | N/A | N/A | 100.58 | 26.74 | N/A | N/A |
| AD-958787.1 | 64.47 | 17.17 | 44.85 | 2.84 | 82.76 | 33.16 | 147.73 | 40.56 |
| AD-958789.1 | 91.93 | 66.06 | 103.00 | 45.27 | 112.51 | 57.38 | 114.28 | 34.86 |
| AD-958797.1 | 110.94 | 37.72 | 90.72 | 14.45 | 157.07 | 36.85 | 112.57 | 35.82 |
| AD-958798.1 | 92.65 | 40.56 | 165.09 | 32.64 | 209.47 | 77.42 | 133.79 | 45.64 |
| AD-958864.1 | 21.10 | 4.35 | 49.06 | 20.36 | 72.72 | 27.07 | 74.04 | 19.80 |
| AD-958867.1 | 89.10 | 37.89 | 29.90 | 6.84 | 59.76 | 25.56 | 108.56 | 30.59 |
| AD-958868.1 | 32.62 | 10.79 | 30.56 | 4.51 | 96.18 | 18.29 | 40.38 | 6.28 |
| AD-958869.1 | 26.76 | 6.16 | 44.86 | 10.42 | 121.21 | 39.64 | 60.89 | 12.57 |
| AD-958870.1 | 26.33 | 12.07 | 16.65 | 7.97 | 88.85 | 26.28 | 95.14 | 48.08 |
| AD-958879.1 | 63.83 | 4.19 | 53.47 | 22.96 | N/A | N/A | 141.39 | 37.66 |
| AD-958880.1 | 89.45 | 12.29 | 139.87 | 8.79 | 144.59 | 58.02 | 122.26 | 31.15 |
| AD-958881.1 | 29.00 | 8.78 | 71.29 | 20.05 | 148.34 | 61.91 | 122.65 | 42.94 |
| AD-958890.1 | 100.99 | 34.10 | 95.15 | 20.90 | 69.56 | 33.38 | 88.12 | 11.29 |
| AD-958891.1 | 99.25 | 8.10 | N/A | N/A | 82.04 | 39.57 | N/A | N/A |
| AD-958938.1 | 90.75 | 31.60 | 65.05 | 20.06 | 56.72 | 21.26 | 95.24 | 35.67 |
| AD-958942.1 | 90.60 | 36.96 | 91.58 | 27.03 | 112.20 | 55.98 | 125.28 | 34.94 |
| AD-958943.1 | 80.71 | 21.23 | 119.05 | 33.55 | 116.77 | 41.35 | 121.80 | 30.14 |
| AD-958944.1 | 42.01 | 21.43 | 85.57 | 26.15 | 91.00 | 31.50 | 113.39 | 19.41 |
| AD-958983.1 | 149.12 | 29.19 | 171.07 | 80.97 | 59.88 | 8.72 | 147.38 | 42.92 |
| AD-958984.1 | 85.62 | 10.54 | 62.95 | 8.69 | 108.22 | 52.36 | 134.12 | 60.27 |
| AD-958985.1 | 126.15 | 28.49 | 124.91 | 26.67 | 108.39 | 35.48 | 106.14 | 25.54 |
| AD-959013.1 | 87.77 | 18.86 | 126.09 | N/A | 129.55 | 35.23 | 105.33 | 11.64 |
| AD-959025.1 | 101.25 | 33.41 | 71.27 | 5.24 | 88.15 | 9.86 | 127.16 | 48.90 |
| AD-959102.1 | 79.84 | 20.78 | 73.00 | 17.04 | 137.15 | 36.40 | 105.86 | 41.81 |
| AD-959167.1 | 15.57 | 4.16 | 34.20 | 9.33 | 41.38 | 10.33 | 94.66 | 22.25 |
| AD-959168.1 | 38.02 | 32.23 | 20.12 | 25.03 | 68.47 | 33.46 | 111.47 | 10.76 |
| AD-959169.1 | 62.06 | 20.35 | 60.92 | 27.86 | 118.26 | 33.39 | 126.35 | 44.52 |
| AD-959183.1 | 76.78 | 19.33 | 81.99 | 12.02 | 75.83 | 38.34 | 115.03 | 36.34 |
| AD-959210.1 | 48.56 | 16.42 | 183.44 | 54.08 | 130.41 | 24.54 | 111.99 | 23.48 |
| AD-959211.1 | 89.38 | 25.24 | 103.61 | 41.19 | 57.72 | 5.99 | 125.66 | 21.70 |
| AD-959216.1 | 56.01 | 8.86 | 101.32 | 27.54 | 77.75 | 24.58 | 97.10 | 12.61 |
| AD-959217.1 | 106.67 | 25.12 | 81.58 | 32.03 | 78.81 | 14.04 | 122.46 | 16.80 |
| AD-959239.1 | 60.72 | 12.76 | 109.28 | 38.96 | 68.95 | 25.93 | 129.20 | 34.41 |
| AD-959240.1 | 87.66 | 27.53 | 122.33 | 18.29 | 130.69 | 20.16 | 97.05 | 28.88 |
| AD-959242.1 | 50.84 | 36.78 | 28.44 | 13.18 | 83.49 | 26.35 | N/A | N/A |
| AD-959262.1 | 100.01 | 21.64 | 111.29 | 35.95 | 66.84 | 34.78 | 102.46 | 16.82 |
| AD-959280.1 | 137.56 | 70.24 | 71.28 | 19.35 | 84.13 | 13.02 | 139.79 | 49.62 |
| AD-959300.1 | 72.61 | 34.42 | 92.30 | N/A | 69.59 | 9.46 | 99.50 | 29.67 |
| AD-959301.1 | 43.32 | 16.46 | 42.94 | 14.04 | 87.26 | 21.72 | 124.29 | 38.14 |
| AD-959449.1 | N/A | N/A | 35.63 | 4.87 | 90.79 | 34.60 | 101.89 | 56.45 |
| AD-959484.1 | 121.31 | 12.95 | 152.70 | 28.12 | 131.34 | 59.37 | 81.74 | 30.01 |
| AD-959485.1 | 41.70 | 8.50 | 68.38 | 35.90 | 105.03 | 36.35 | 67.93 | 26.54 |
| AD-959486.1 | 45.69 | 0.45 | 24.95 | 8.00 | 111.38 | 24.30 | 92.20 | 13.26 |
| AD-959487.1 | 48.60 | 14.68 | 78.78 | 7.90 | 119.56 | 42.56 | 102.84 | 33.95 |
| AD-959489.1 | 41.36 | 12.63 | 32.69 | 9.69 | 52.23 | 18.83 | 70.21 | 20.41 |
| AD-959490.1 | 69.96 | 3.67 | 168.98 | 63.75 | 66.36 | 25.75 | 111.16 | 47.10 |
| AD-959497.1 | 48.18 | 20.79 | 43.80 | 17.34 | 62.18 | 21.89 | 67.80 | 12.96 |
| AD-959498.1 | 55.95 | 15.91 | 54.81 | 16.76 | 71.94 | 30.83 | 92.27 | 51.64 |
| AD-959499.1 | 45.74 | 3.95 | 39.08 | 11.83 | 53.19 | 7.48 | 72.99 | 31.12 |
| AD-959506.1 | 47.20 | 15.04 | 46.65 | 25.20 | 50.00 | 10.01 | 86.77 | 39.75 |
| AD-959515.1 | 59.68 | 20.80 | 115.57 | 17.52 | 44.18 | 10.47 | 86.21 | 34.66 |
| AD-959516.1 | 53.68 | 10.82 | 96.50 | 20.81 | 71.59 | 45.59 | 80.56 | 22.23 |
| AD-959517.1 | 38.17 | 13.45 | 55.79 | 9.50 | 71.67 | 34.72 | 84.13 | 35.23 |
| AD-959518.1 | 40.91 | 9.40 | 47.90 | 11.93 | 59.51 | 19.68 | 58.97 | 15.60 |
| AD-959519.1 | 48.61 | 13.25 | 52.32 | 20.09 | N/A | N/A | 39.43 | 11.24 |
| AD-959520.1 | 31.99 | 7.68 | 55.79 | 41.30 | 45.20 | 21.52 | 43.73 | 11.89 |
| AD-959521.1 | 21.97 | 4.34 | 50.65 | 10.22 | 72.56 | 30.27 | 59.37 | 34.53 |
| AD-959524.1 | 41.04 | 8.29 | 58.11 | 24.71 | 61.84 | 11.97 | 72.39 | 28.32 |
| AD-959560.1 | 40.47 | 13.14 | 35.70 | 4.75 | 51.52 | 21.22 | 166.63 | 22.00 |
| AD-959561.1 | 29.62 | 5.06 | 72.66 | 12.14 | 83.57 | 43.35 | 99.56 | 11.30 |
| AD-959567.1 | 53.29 | 16.56 | 60.33 | 2.07 | 85.97 | 32.80 | 120.29 | 37.10 |
| AD-959568.1 | 53.60 | 7.46 | 75.89 | 42.79 | 98.98 | 19.83 | 60.18 | 6.54 |
| AD-959571.1 | 76.64 | 32.58 | 54.46 | 1.08 | 95.94 | 26.30 | 80.69 | 38.95 |
| AD-959572.1 | 57.48 | 20.02 | 67.95 | 21.26 | 170.23 | 25.99 | 134.77 | 61.19 |
| AD-959607.1 | 58.64 | 15.31 | 38.25 | 16.16 | 87.18 | 15.57 | 44.32 | 26.73 |
| AD-959608.1 | 30.55 | 13.99 | 58.66 | 26.42 | 49.19 | 13.42 | 56.83 | 24.05 |
| AD-959619.1 | 56.00 | 4.63 | 80.86 | 27.34 | 85.04 | 34.66 | 105.24 | 25.17 |
| AD-959620.1 | 139.75 | 58.34 | 78.24 | 37.92 | 101.79 | 10.72 | 105.39 | 23.82 |
| AD-959661.1 | 57.89 | 27.39 | 30.89 | 8.64 | 54.82 | 23.78 | 52.18 | 28.15 |
| AD-959682.1 | 51.99 | 20.28 | 49.30 | 5.41 | 93.21 | 20.22 | 81.36 | 29.14 |
| AD-959689.1 | 94.33 | 19.35 | 61.16 | 28.03 | 94.96 | 46.45 | 93.67 | 31.84 |
| AD-959693.1 | 53.89 | 14.70 | 68.85 | 37.73 | 74.15 | 19.80 | 139.05 | 10.21 |
| AD-959696.1 | 50.52 | 5.92 | 36.70 | 15.69 | 53.06 | 13.75 | 61.30 | 21.89 |

The application's sequence listing, which the Patent Office published only in electronic form, follows.

SEQUENCE LISTING (3441 sequences)

SEQ ID NO: 1 - DNA, 2100 bp, Homo sapiens
gagccagcaaggccacccatccaggcacctctcagcacagcagagctttccagaggaagcctcaccaagcctctgcaatgaggttcttctgtgcacgttgctgcagctttgggcctgagatgccagctgtccagctgctgcttctggcctgcctggtgtgggatgtgggggccaggacagctcagctcaggaaggccaatgaccagagtggccgatgccagtataccttcagtgtggccagtcccaatgaatccagctgcccagagcagagccaggccatgtcagtcatccataacttacagagagacagcagcacccaacgcttagacctggaggccaccaaagctcgactcagctccctggagagcctcctccaccaattgaccttggaccaggctgccaggccccaggagacccaggaggggctgcagagggagctgggcaccctgaggcgggagcgggaccagctggaaacccaaaccagagagttggagactgcctacagcaacctcctccgagacaagtcagttctggaggaagagaagaagcgactaaggcaagaaaatgagaatctggccaggaggttggaaagcagcagccaggaggtagcaaggctgagaaggggccagtgtccccagacccgagacactgctcgggctgtgccaccaggctccagagaagtttctacgtggaatttggacactttggccttccaggaactgaagtccgagctaactgaagttcctgcttcccgaattttgaaggagagcccatctggctatctcaggagtggagagggagacaccggatgtggagaactagtttgggtaggagagcctctcacgctgagaacagcagaaacaattactggcaagtatggtgtgtggatgcgagaccccaagcccacctacccctacacccaggagaccacgtggagaatcgacacagttggcacggatgtccgccaggtttttgagtatgacctcatcagccagtttatgcagggctacccttctaaggttcacatactgcctaggccactggaaagcacgggtgctgtggtgtactcggggagcctctatttccagggcgctgagtccagaactgtcataagatatgagctgaataccgagacagtgaaggctgagaaggaaatccctggagctggctaccacggacagttcccgtattcttggggtggctacacggacattgacttggctgtggatgaagcaggcctctgggtcatttacagcaccgatgaggccaaaggtgccattgtcctctccaaactgaacccagagaatctggaactcgaacaaacctgggagacaaacatccgtaagcagtcagtcgccaatgccttcatcatctgtggcaccttgtacaccgtcagcagctacacctcagcagatgctaccgtcaactttgcttatgacacaggcacaggtatcagcaagaccctgaccatcccattcaagaaccgctataagtacagcagcatgattgactacaaccccctggagaagaagctctttgcctgggacaacttgaacatggtcacttatgacatcaagctctccaagatgtgaaaagcctccaagctgtacaggcaatggcagaaggagatgctcagggctcctggggggagcaggctgaagggagagccagccagccagggcccaggcagctttgactgctttccaagttttcattaatccagaaggatgaacatggtcaccatctaactattcaggaattgtagtctgagggcgtagacaatttcatataataaatatcctttatcttctgtcagcatttatgggatgtttaatgacatagttcaagttttcttgtgatttggggcaaaagctgtaaggcataatagtttcttcctgaaaaccattgctcttgcatgttacatggttaccacaagccacaataaaaagcataacttctaaaggaagcagaatagctcctctggccagcatcgaatataagtaagatgcatttactacagttggcttctaatgcttcagatagaatacagttgggtctcacataaccctttacattgtgaaataaaattttcttacccaa

SEQ ID NO: 2 - DNA, 2100 bp, Homo sapiens
ttgggtaagaaaattttatttcacaatgtaaagggttatgtgagacccaactgtattctatctgaagcattagaagccaactgtagtaaatgcatcttacttatattcgatgctggccagaggagctattctgcttcctttagaagttatgctttttattgtggcttgtggtaaccatgtaacatgcaagagcaatggttttcaggaagaaactattatgccttacagcttttgccccaaatcacaagaaaacttgaactatgtcattaaacatcccataaatgctgacagaagataaaggatatttattatatgaaattgtctacgccctcagactacaattcctgaatagttagatggtgaccatgttcatccttctggattaatgaaaacttggaaagcagtcaaagctgcctgggccctggctggctggctctcccttcagcctgctccccccaggagccctgagcatctccttctgccattgcctgtacagcttggaggcttttcacatcttggagagcttgatgtcataagtgaccatgttcaagttgtcccaggcaaagagcttcttctccagggggttgtagtcaatcatgctgctgtacttatagcggttcttgaatgggatggtcagggtcttgctgatacctgtgcctgtgtcataagcaaagttgacggtagcatctgctgaggtgtagctgctgacggtgtacaaggtgccacagatgatgaaggcattggcgactgactgcttacggatgtttgtctcccaggtttgttcgagttccagattctctgggttcagtttggagaggacaatggcacctttggcctcatcggtgctgtaaatgacccagaggcctgcttcatccacagccaagtcaatgtccgtgtagccaccccaagaatacgggaactgtccgtggtagccagctccagggatttccttctcagccttcactgtctcggtattcagctcatatcttatgacagttctggactcagcgccctggaaatagaggctccccgagtacaccacagcacccgtgctttccagtggcctaggcagtatgtgaaccttagaagggtagccctgcataaactggctgatgaggtcatactcaaaaacctggcggacatccgtgccaactgtgtcgattctccacgtggtctcctgggtgtaggggtaggtgggcttggggtctcgcatccacacaccatacttgccagtaattgtttctgctgttctcagcgtgagaggctctcctacccaaactagttctccacatccggtgtctccctctccactcctgagatagccagatgggctctccttcaaaattcgggaagcaggaacttcagttagctcggacttcagttcctggaaggccaaagtgtccaaattccacgtagaaacttctctggagcctggtggcacagcccgagcagtgtctcgggtctggggacactggccccttctcagccttgctacctcctggctgctgctttccaacctcctggccagattctcattttcttgccttagtcgcttcttctcttcctccagaactgacttgtctcggaggaggttgctgtaggcagtctccaactctctggtttgggtttccagctggtcccgctcccgcctcagggtgcccagctccctctgcagcccctcctgggtctcctggggcctggcagcctggtccaaggtcaattggtggaggaggctctccagggagctgagtcgagctttggtggcctccaggtctaagcgttgggtgctgctgtctctctgtaagttatggatgactgacatggcctggctctgctctgggcagctggattcattgggactggccacactgaaggtatactggcatcggccactctggtcattggccttcctgagctgagctgtcctggcccccacatcccacaccaggcaggccagaagcagcagctggacagctggcatctcaggcccaaagctgcagcaacgtgcacagaagaacctcattgcagaggcttggtgaggcttcctctggaaagctctgctgtgctgagaggtgcctggatgggtggccttgctggctc

SEQ ID NO: 3 - DNA, 21 bp, Artificial Sequence
  source: /note="Description of Artificial Sequence: Synthetic oligonucleotide"
  source: /note="Description of Combined DNA/RNA Molecule: Synthetic oligonucleotide"
gucccaaugaauccagcugtt

SEQ ID NO: 4 - DNA, 21 bp, Artificial Sequence
  source: /note="Description of Artificial Sequence: Synthetic oligonucleotide"
  source: /note="Description of Combined DNA/RNA Molecule: Synthetic oligonucleotide"
ccaugucagucauccauaatt

SEQ ID NO: 5 - DNA, 21 bp, Artificial Sequence
  source: /note="Description of Artificial Sequence: Synthetic oligonucleotide"
  source: /note="Description of Combined DNA/RNA Molecule: Synthetic oligonucleotide"
augucagucauccauaacutt

SEQ ID NO: 6 - DNA, 21 bp, Artificial Sequence
  source: /note="Description of Artificial Sequence: Synthetic oligonucleotide"
  source: /note="Description of Combined DNA/RNA Molecule: Synthetic oligonucleotide"
gcuggaaacccaaaccagatt

SEQ ID NO: 7 - DNA, 21 bp, Artificial Sequence
  source: /note="Description of Artificial Sequence: Synthetic oligonucleotide"
  source: /note="Description of Combined DNA/RNA Molecule: Synthetic oligonucleotide"
aaacccaaaccagagaguutt

SEQ ID NO: 8 - DNA, 21 bp, Artificial Sequence
  source: /note="Description of Artificial Sequence: Synthetic oligonucleotide"
  source: /note="Description of Combined DNA/RNA Molecule: Synthetic oligonucleotide"
aacccaaaccagagaguugtt

SEQ ID NO: 9 - DNA, 21 bp, Artificial Sequence
  source: /note="Description of Artificial Sequence: Synthetic oligonucleotide"
  source: /note="Description of Combined DNA/RNA Molecule: Synthetic oligonucleotide"
ccgagacaagucaguucugtt

SEQ ID NO: 10 - DNA, 21 bp, Artificial Sequence
  source: /note="Description of Artificial Sequence: Synthetic oligonucleotide"
  source: /note="Description of Combined DNA/RNA Molecule: Synthetic oligonucleotide"
gagacaagucaguucuggatt

SEQ ID NO: 11 - DNA, 21 bp, Artificial Sequence
  source: /note="Description of Artificial Sequence: Synthetic oligonucleotide"
  source: /note="Description of Combined DNA/RNA Molecule: Synthetic oligonucleotide"
agacaagucaguucuggagtt

SEQ ID NO: 12 - DNA, 21 bp, Artificial Sequence
  source: /note="Description of Artificial Sequence: Synthetic oligonucleotide"
  source: /note="Description of Combined DNA/RNA Molecule: Synthetic oligonucleotide"
caguucuggaggaagagaatt

SEQ ID NO: 13 - DNA, 21 bp, Artificial Sequence
  source: /note="Description of Artificial Sequence: Synthetic oligonucleotide"
  source: /note="Description of Combined DNA/RNA Molecule: Synthetic oligonucleotide"
aguucuggaggaagagaagtt

SEQ ID NO: 14 - DNA, 21 bp, Artificial Sequence
  source: /note="Description of Artificial Sequence: Synthetic oligonucleotide"
  source: /note="Description of Combined DNA/RNA Molecule: Synthetic oligonucleotide"
ucuggaggaagagaagaagtt

SEQ ID NO: 15 - DNA, 21 bp, Artificial Sequence
  source: /note="Description of Artificial Sequence: Synthetic oligonucleotide"
  source: /note="Description of Combined DNA/RNA Molecule: Synthetic oligonucleotide"
aggcuccagagaaguuucutt

SEQ ID NO: 16 - DNA, 21 bp, Artificial Sequence
  source: /note="Description of Artificial Sequence: Synthetic oligonucleotide"
  source: /note="Description of Combined DNA/RNA Molecule: Synthetic oligonucleotide"
ggcuccagagaaguuucuatt

SEQ ID NO: 17 - DNA, 21 bp, Artificial Sequence
  source: /note="Description of Artificial Sequence: Synthetic oligonucleotide"
  source: /note="Description of Combined DNA/RNA Molecule: Synthetic oligonucleotide"
gcuccagagaaguuucuactt

SEQ ID NO: 18 - DNA, 21 bp, Artificial Sequence
  source: /note="Description of Artificial Sequence: Synthetic oligonucleotide"
  source: /note="Description of Combined DNA/RNA Molecule: Synthetic oligonucleotide"
cuccagagaaguuucuacgtt

SEQ ID NO: 19 - DNA, 21 bp, Artificial Sequence
  source: /note="Description of Artificial Sequence: Synthetic oligonucleotide"
  source: /note="Description of Combined DNA/RNA Molecule: Synthetic oligonucleotide"
ugaaguccgagcuaacugatt

SEQ ID NO: 20 - DNA, 21 bp, Artificial Sequence
  source: /note="Description of Artificial Sequence: Synthetic oligonucleotide"
  source: /note="Description of Combined DNA/RNA Molecule: Synthetic oligonucleotide"
guccgagcuaacugaaguutt

SEQ ID NO: 21 - DNA, 21 bp, Artificial Sequence
  source: /note="Description of Artificial Sequence: Synthetic oligonucleotide"
  source: /note="Description of Combined DNA/RNA Molecule: Synthetic oligonucleotide"
uccgagcuaacugaaguuctt

SEQ ID NO: 22 - DNA, 21 bp, Artificial Sequence
  source: /note="Description of Artificial Sequence: Synthetic oligonucleotide"
  source: /note="Description of Combined DNA/RNA Molecule: Synthetic oligonucleotide"
ccgagcuaacugaaguucctt

SEQ ID NO: 23 - DNA, 21 bp, Artificial Sequence
  source: /note="Description of Artificial Sequence: Synthetic oligonucleotide"
  source: /note="Description of Combined DNA/RNA Molecule: Synthetic oligonucleotide"
cgagcuaacugaaguuccutt

SEQ ID NO: 24 - DNA, 21 bp, Artificial Sequence
  source: /note="Description of Artificial Sequence: Synthetic oligonucleotide"
  source: /note="Description of Combined DNA/RNA Molecule: Synthetic oligonucleotide"
gagcuaacugaaguuccugtt

SEQ ID NO: 25 - DNA, 21 bp, Artificial Sequence
  source: /note="Description of Artificial Sequence: Synthetic oligonucleotide"
  source: /note="Description of Combined DNA/RNA Molecule: Synthetic oligonucleotide"
agcuaacugaaguuccugctt

SEQ ID NO: 26 - DNA, 21 bp, Artificial Sequence
  source: /note="Description of Artificial Sequence: Synthetic oligonucleotide"
  source: /note="Description of Combined DNA/RNA Molecule: Synthetic oligonucleotide"
gcuaacugaaguuccugcutt

SEQ ID NO: 27 - DNA, 21 bp, Artificial Sequence
  source: /note="Description of Artificial Sequence: Synthetic oligonucleotide"
  source: /note="Description of Combined DNA/RNA Molecule: Synthetic oligonucleotide"
guuccugcuucccgaauuutt

SEQ ID NO: 28 - DNA, 21 bp, Artificial Sequence
  source: /note="Description of Artificial Sequence: Synthetic oligonucleotide"
  source: /note="Description of Combined DNA/RNA Molecule: Synthetic oligonucleotide"
uuccugcuucccgaauuuutt

SEQ ID NO: 29 - DNA, 21 bp, Artificial Sequence
  source: /note="Description of Artificial Sequence: Synthetic oligonucleotide"
  source: /note="Description of Combined DNA/RNA Molecule: Synthetic oligonucleotide"
uccugcuucccgaauuuugtt

SEQ ID NO: 30 - DNA, 21 bp, Artificial Sequence
  source: /note="Description of Artificial Sequence: Synthetic oligonucleotide"
  source: /note="Description of Combined DNA/RNA Molecule: Synthetic oligonucleotide"
ccugcuucccgaauuuugatt

SEQ ID NO: 31 - DNA, 21 bp, Artificial Sequence
  source: /note="Description of Artificial Sequence: Synthetic oligonucleotide"
  source: /note="Description of Combined DNA/RNA Molecule: Synthetic oligonucleotide"
cugcuucccgaauuuugaatt

SEQ ID NO: 32 - DNA, 21 bp, Artificial Sequence
  source: /note="Description of Artificial Sequence: Synthetic oligonucleotide"
  source: /note="Description of Combined DNA/RNA Molecule: Synthetic oligonucleotide"
ugcuucccgaauuuugaagtt

SEQ ID NO: 33 - DNA, 21 bp, Artificial Sequence
  source: /note="Description of Artificial Sequence: Synthetic oligonucleotide"
  source: /note="Description of Combined DNA/RNA Molecule: Synthetic oligonucleotide"
gcuucccgaauuuugaaggtt

SEQ ID NO: 34 - DNA, 21 bp, Artificial Sequence
  source: /note="Description of Artificial Sequence: Synthetic oligonucleotide"
  source: /note="Description of Combined DNA/RNA Molecule: Synthetic oligonucleotide"
cuucccgaauuuugaaggatt

SEQ ID NO: 35 - DNA, 21 bp, Artificial Sequence
  source: /note="Description of Artificial Sequence: Synthetic oligonucleotide"
  source: /note="Description of Combined DNA/RNA Molecule: Synthetic oligonucleotide"
uucccgaauuuugaaggagtt

SEQ ID NO: 36 - DNA, 21 bp, Artificial Sequence
  source: /note="Description of Artificial Sequence: Synthetic oligonucleotide"
  source: /note="Description of Combined DNA/RNA Molecule: Synthetic oligonucleotide"
ucccgaauuuugaaggagatt

SEQ ID NO: 37 - DNA, 21 bp, Artificial Sequence
  source: /note="Description of Artificial Sequence: Synthetic oligonucleotide"
  source: /note="Description of Combined DNA/RNA Molecule: Synthetic oligonucleotide"
cccgaauuuugaaggagagtt

SEQ ID NO: 38 - DNA, 21 bp, Artificial Sequence
  source: /note="Description of Artificial Sequence: Synthetic oligonucleotide"
  source: /note="Description of Combined DNA/RNA Molecule: Synthetic oligonucleotide"
cggauguggagaacuaguutt

SEQ ID NO: 39 - DNA, 21 bp, Artificial Sequence
  source: /note="Description of Artificial Sequence: Synthetic oligonucleotide"
  source: /note="Description of Combined DNA/RNA Molecule: Synthetic oligonucleotide"
ggauguggagaacuaguuutt

SEQ ID NO: 40 - DNA, 21 bp, Artificial Sequence
  source: /note="Description of Artificial Sequence: Synthetic oligonucleotide"
  source: /note="Description of Combined DNA/RNA Molecule: Synthetic oligonucleotide"
gauguggagaacuaguuugtt

SEQ ID NO: 41 - DNA, 21 bp, Artificial Sequence
  source: /note="Description of Artificial Sequence: Synthetic oligonucleotide"
  source: /note="Description of Combined DNA/RNA Molecule: Synthetic oligonucleotide"
auguggagaacuaguuuggtt

SEQ ID NO: 42 - DNA, 21 bp, Artificial Sequence
  source: /note="Description of Artificial Sequence: Synthetic oligonucleotide"
  source: /note="Description of Combined DNA/RNA Molecule: Synthetic oligonucleotide"
uguggagaacuaguuugggtt

SEQ ID NO: 43 - DNA, 21 bp, Artificial Sequence
  source: /note="Description of Artificial Sequence: Synthetic oligonucleotide"
  source: /note="Description of Combined DNA/RNA Molecule: Synthetic oligonucleotide"
guggagaacuaguuugggutt

SEQ ID NO: 44 - DNA, 21 bp, Artificial Sequence
  source: /note="Description of Artificial Sequence: Synthetic oligonucleotide"
  source: /note="Description of Combined DNA/RNA Molecule: Synthetic oligonucleotide"
uggagaacuaguuuggguatt

SEQ ID NO: 45 - DNA, 21 bp, Artificial Sequence
  source: /note="Description of Artificial Sequence: Synthetic oligonucleotide"
  source: /note="Description of Combined DNA/RNA Molecule: Synthetic oligonucleotide"
ggagaacuaguuuggguagtt

SEQ ID NO: 46 - DNA, 21 bp, Artificial Sequence
  source: /note="Description of Artificial Sequence: Synthetic oligonucleotide"
  source: /note="Description of Combined DNA/RNA Molecule: Synthetic oligonucleotide"
gagaacuaguuuggguaggtt

SEQ ID NO: 47 - DNA, 21 bp, Artificial Sequence
  source: /note="Description of Artificial Sequence: Synthetic oligonucleotide"
  source: /note="Description of Combined DNA/RNA Molecule: Synthetic oligonucleotide"
acgcugagaacagcagaaatt

SEQ ID NO: 48 - DNA, 21 bp, Artificial Sequence
  source: /note="Description of Artificial Sequence: Synthetic oligonucleotide"
  source: /note="Description of Combined DNA/RNA Molecule: Synthetic oligonucleotide"
gcugagaacagcagaaacatt

SEQ ID NO: 49 - DNA, 21 bp, Artificial Sequence
  source: /note="Description of Artificial Sequence: Synthetic oligonucleotide"
  source: /note="Description of Combined DNA/RNA Molecule: Synthetic oligonucleotide"
cugagaacagcagaaacaatt

SEQ ID NO: 50 - DNA, 21 bp, Artificial Sequence
  source: /note="Description of Artificial Sequence: Synthetic oligonucleotide"
  source: /note="Description of Combined DNA/RNA Molecule: Synthetic oligonucleotide"
ugagaacagcagaaacaautt

SEQ ID NO: 51 - DNA, 21 bp, Artificial Sequence
  source: /note="Description of Artificial Sequence: Synthetic oligonucleotide"
  source: /note="Description of Combined DNA/RNA Molecule: Synthetic oligonucleotide"
gagaacagcagaaacaauutt

SEQ ID NO: 52 - DNA, 21 bp, Artificial Sequence
  source: /note="Description of Artificial Sequence: Synthetic oligonucleotide"
  source: /note="Description of Combined DNA/RNA Molecule: Synthetic oligonucleotide"
agaacagcagaaacaauuatt

SEQ ID NO: 53 - DNA, 21 bp, Artificial Sequence
  source: /note="Description of Artificial Sequence: Synthetic oligonucleotide"
  source: /note="Description of Combined DNA/RNA Molecule: Synthetic oligonucleotide"
gaacagcagaaacaauuactt

SEQ ID NO: 54 - DNA, 21 bp, Artificial Sequence
  source: /note="Description of Artificial Sequence: Synthetic oligonucleotide"
  source: /note="Description of Combined DNA/RNA Molecule: Synthetic oligonucleotide"
aacagcagaaacaauuacutt

SEQ ID NO: 55 - DNA, 21 bp, Artificial Sequence
  source: /note="Description of Artificial Sequence: Synthetic oligonucleotide"
  source: /note="Description of Combined DNA/RNA Molecule: Synthetic oligonucleotide"
acagcagaaacaauuacugtt

SEQ ID NO: 56 - DNA, 21 bp, Artificial Sequence
  source: /note="Description of Artificial Sequence: Synthetic oligonucleotide"
  source: /note="Description of Combined DNA/RNA Molecule: Synthetic oligonucleotide"
cagcagaaacaauuacuggtt

SEQ ID NO: 57 - DNA, 21 bp, Artificial Sequence
  source: /note="Description of Artificial Sequence: Synthetic oligonucleotide"
  source: /note="Description of Combined DNA/RNA Molecule: Synthetic oligonucleotide"
agcagaaacaauuacuggctt

SEQ ID NO: 58 - DNA, 21 bp, Artificial Sequence
  source: /note="Description of Artificial Sequence: Synthetic oligonucleotide"
  source: /note="Description of Combined DNA/RNA Molecule: Synthetic oligonucleotide"
gcagaaacaauuacuggcatt

SEQ ID NO: 59 - DNA, 21 bp, Artificial Sequence
  source: /note="Description of Artificial Sequence: Synthetic oligonucleotide"
  source: /note="Description of Combined DNA/RNA Molecule: Synthetic oligonucleotide"
cagaaacaauuacuggcaatt

SEQ ID NO: 60 - DNA, 21 bp, Artificial Sequence
  source: /note="Description of Artificial Sequence: Synthetic oligonucleotide"
  source: /note="Description of Combined DNA/RNA Molecule: Synthetic oligonucleotide"
agaaacaauuacuggcaagtt

SEQ ID NO: 61 - DNA, 21 bp, Artificial Sequence
  source: /note="Description of Artificial Sequence: Synthetic oligonucleotide"
  source: /note="Description of Combined DNA/RNA Molecule: Synthetic oligonucleotide"
gaaacaauuacuggcaagutt

SEQ ID NO: 62 - DNA, 21 bp, Artificial Sequence
  source: /note="Description of Artificial Sequence: Synthetic oligonucleotide"
  source: /note="Description of Combined DNA/RNA Molecule: Synthetic oligonucleotide"
aacaauuacuggcaaguautt

SEQ ID NO: 63 - DNA, 21 bp, Artificial Sequence
  source: /note="Description of Artificial Sequence: Synthetic oligonucleotide"
  source: /note="Description of Combined DNA/RNA Molecule: Synthetic oligonucleotide"
acaauuacuggcaaguaugtt

SEQ ID NO: 64 - DNA, 21 bp, Artificial Sequence
  source: /note="Description of Artificial Sequence: Synthetic oligonucleotide"
  source: /note="Description of Combined DNA/RNA Molecule: Synthetic oligonucleotide"
caauuacuggcaaguauggtt

SEQ ID NO: 65 - DNA, 21 bp, Artificial Sequence
  source: /note="Description of Artificial Sequence: Synthetic oligonucleotide"
  source: /note="Description of Combined DNA/RNA Molecule: Synthetic oligonucleotide"
aauuacuggcaaguauggutt

SEQ ID NO: 66 - DNA, 21 bp, Artificial Sequence
  source: /note="Description of Artificial Sequence: Synthetic oligonucleotide"
  source: /note="Description of Combined DNA/RNA Molecule: Synthetic oligonucleotide"
uacuggcaaguauggugugtt

SEQ ID NO: 67 - DNA, 21 bp, Artificial Sequence
  source: /note="Description of Artificial Sequence: Synthetic oligonucleotide"
  source: /note="Description of Combined DNA/RNA Molecule: Synthetic oligonucleotide"
auguccgccagguuuuugatt

SEQ ID NO: 68 - DNA, 21 bp, Artificial Sequence
  source: /note="Description of Artificial Sequence: Synthetic oligonucleotide"
  source: /note="Description of Combined DNA/RNA Molecule: Synthetic oligonucleotide"
uguccgccagguuuuugagtt

SEQ ID NO: 69 - DNA, 21 bp, Artificial Sequence
  source: /note="Description of Artificial Sequence: Synthetic oligonucleotide"
  source: /note="Description of Combined DNA/RNA Molecule: Synthetic oligonucleotide"
guccgccagguuuuugagutt

SEQ ID NO: 70 - DNA, 21 bp, Artificial Sequence
  source: /note="Description of Artificial Sequence: Synthetic oligonucleotide"
  source: /note="Description of Combined DNA/RNA Molecule: Synthetic oligonucleotide"
uccgccagguuuuugaguatt

SEQ ID NO: 71 - DNA, 21 bp, Artificial Sequence
  source: /note="Description of Artificial Sequence: Synthetic oligonucleotide"
  source: /note="Description of Combined DNA/RNA Molecule: Synthetic oligonucleotide"
ccgccagguuuuugaguautt

SEQ ID NO: 72 - DNA, 21 bp, Artificial Sequence
  source: /note="Description of Artificial Sequence: Synthetic oligonucleotide"
  source: /note="Description of Combined DNA/RNA Molecule: Synthetic oligonucleotide"
cgccagguuuuugaguaugtt

SEQ ID NO: 73 - DNA, 21 bp, Artificial Sequence
  source: /note="Description of Artificial Sequence: Synthetic oligonucleotide"
  source: /note="Description of Combined DNA/RNA Molecule: Synthetic oligonucleotide"
gccagguuuuugaguaugatt

SEQ ID NO: 74 - DNA, 21 bp, Artificial Sequence
  source: /note="Description of Artificial Sequence: Synthetic oligonucleotide"
  source: /note="Description of Combined DNA/RNA Molecule: Synthetic oligonucleotide"
ccagguuuuugaguaugactt

SEQ ID NO: 75 - DNA, 21 bp, Artificial Sequence
  source: /note="Description of Artificial Sequence: Synthetic oligonucleotide"
  source: /note="Description of Combined DNA/RNA Molecule: Synthetic oligonucleotide"
cagguuuuugaguaugacctt

SEQ ID NO: 76 - DNA, 21 bp, Artificial Sequence
  source: /note="Description of Artificial Sequence: Synthetic oligonucleotide"
  source: /note="Description of Combined DNA/RNA Molecule: Synthetic oligonucleotide"
agguuuuugaguaugaccutt

SEQ ID NO: 77 - DNA, 21 bp, Artificial Sequence
  source: /note="Description of Artificial Sequence: Synthetic oligonucleotide"
  source: /note="Description of Combined DNA/RNA Molecule: Synthetic oligonucleotide"
gguuuuugaguaugaccuctt

SEQ ID NO: 78 - DNA, 21 bp, Artificial Sequence
  source: /note="Description of Artificial Sequence: Synthetic oligonucleotide"
  source: /note="Description of Combined DNA/RNA Molecule: Synthetic oligonucleotide"
guuuuugaguaugaccucatt

SEQ ID NO: 79 - DNA, 21 bp, Artificial Sequence
  source: /note="Description of Artificial Sequence: Synthetic oligonucleotide"
  source: /note="Description of Combined DNA/RNA Molecule: Synthetic oligonucleotide"
gaccucaucagccaguuuatt

SEQ ID NO: 80 - DNA, 21 bp, Artificial Sequence
  source: /note="Description of Artificial Sequence: Synthetic oligonucleotide"
  source: /note="Description of Combined DNA/RNA Molecule: Synthetic oligonucleotide"
accucaucagccaguuuautt

SEQ ID NO: 81 - DNA, 21 bp, Artificial Sequence
  source: /note="Description of Artificial Sequence: Synthetic oligonucleotide"
  source: /note="Description of Combined DNA/RNA Molecule: Synthetic oligonucleotide"
ccucaucagccaguuuaugtt

SEQ ID NO: 82 - DNA, 21 bp, Artificial Sequence
  source: /note="Description of Artificial Sequence: Synthetic oligonucleotide"
  source: /note="Description of Combined DNA/RNA Molecule: Synthetic oligonucleotide"
cucaucagccaguuuaugctt

SEQ ID NO: 83 - DNA, 21 bp, Artificial Sequence
  source: /note="Description of Artificial Sequence: Synthetic oligonucleotide"
  source: /note="Description of Combined DNA/RNA Molecule: Synthetic oligonucleotide"
ucaucagccaguuuaugcatt

SEQ ID NO: 84 - DNA, 21 bp, Artificial Sequence
  source: /note="Description of Artificial Sequence: Synthetic oligonucleotide"
  source: /note="Description of Combined DNA/RNA Molecule: Synthetic oligonucleotide"
ucagccaguuuaugcagggtt

SEQ ID NO: 85 - DNA, 21 bp, Artificial Sequence
  source: /note="Description of Artificial Sequence: Synthetic oligonucleotide"
  source: /note="Description of Combined DNA/RNA Molecule: Synthetic oligonucleotide"
ggcuacccuucuaagguuctt

SEQ ID NO: 86 - DNA, 21 bp, Artificial Sequence
  source: /note="Description of Artificial Sequence: Synthetic oligonucleotide"
  source: /note="Description of Combined DNA/RNA Molecule: Synthetic oligonucleotide"
gcuacccuucuaagguucatt

SEQ ID NO: 87 - DNA, 21 bp, Artificial Sequence
  source: /note="Description of Artificial Sequence: Synthetic oligonucleotide"
  source: /note="Description of Combined DNA/RNA Molecule: Synthetic oligonucleotide"
cuacccuucuaagguucactt

SEQ ID NO: 88 - DNA, 21 bp, Artificial Sequence
  source: /note="Description of Artificial Sequence: Synthetic oligonucleotide"
  source: /note="Description of Combined DNA/RNA Molecule: Synthetic oligonucleotide"
uacccuucuaagguucacatt

SEQ ID NO: 89 - DNA, 21 bp, Artificial Sequence
  source: /note="Description of Artificial Sequence: Synthetic oligonucleotide"
  source: /note="Description of Combined DNA/RNA Molecule: Synthetic oligonucleotide"
acccuucuaagguucacautt

SEQ ID NO: 90 - DNA, 21 bp, Artificial Sequence
  source: /note="Description of Artificial Sequence: Synthetic oligonucleotide"
  source: /note="Description of Combined DNA/RNA Molecule: Synthetic oligonucleotide"
cccuucuaagguucacauatt

SEQ ID NO: 91 - DNA, 21 bp, Artificial Sequence
  source: /note="Description of Artificial Sequence: Synthetic oligonucleotide"
  source: /note="Description of Combined DNA/RNA Molecule: Synthetic oligonucleotide"
ccuucuaagguucacauactt

SEQ ID NO: 92 - DNA, 21 bp, Artificial Sequence
  source: /note="Description of Artificial Sequence: Synthetic oligonucleotide"
  source: /note="Description of Combined DNA/RNA Molecule: Synthetic oligonucleotide"
cuucuaagguucacauacutt

SEQ ID NO: 93 - DNA, 21 bp, Artificial Sequence
  source: /note="Description of Artificial Sequence: Synthetic oligonucleotide"
  source: /note="Description of Combined DNA/RNA Molecule: Synthetic oligonucleotide"
uucuaagguucacauacugtt

SEQ ID NO: 94 - DNA, 21 bp, Artificial Sequence
  source: /note="Description of Artificial Sequence: Synthetic oligonucleotide"
  source: /note="Description of Combined DNA/RNA Molecule: Synthetic oligonucleotide"
cuaagguucacauacugcctt

SEQ ID NO: 95 - DNA, 21 bp, Artificial Sequence
  source: /note="Description of Artificial Sequence: Synthetic oligonucleotide"
  source: /note="Description of Combined DNA/RNA Molecule: Synthetic oligonucleotide"
uaagguucacauacugccutt

SEQ ID NO: 96 - DNA, 21 bp, Artificial Sequence
  source: /note="Description of Artificial Sequence: Synthetic oligonucleotide"
  source: /note="Description of Combined DNA/RNA Molecule: Synthetic oligonucleotide"
gaguccagaacugucauaatt

SEQ ID NO: 97 - DNA, 21 bp, Artificial Sequence
  source: /note="Description of Artificial Sequence: Synthetic oligonucleotide"
  source: /note="Description of Combined DNA/RNA Molecule: Synthetic oligonucleotide"
aguccagaacugucauaagtt

SEQ ID NO: 98 - DNA, 21 bp, Artificial Sequence
  source: /note="Description of Artificial Sequence: Synthetic oligonucleotide"
  source: /note="Description of Combined DNA/RNA Molecule: Synthetic oligonucleotide"
guccagaacugucauaagatt

SEQ ID NO: 99 - DNA, 21 bp, Artificial Sequence
  source: /note="Description of Artificial Sequence: Synthetic oligonucleotide"
  source: /note="Description of Combined DNA/RNA Molecule: Synthetic oligonucleotide"
uccagaacugucauaagautt

SEQ ID NO: 100 - DNA, 21 bp, Artificial Sequence
  source: /note="Description of Artificial Sequence: Synthetic oligonucleotide"
  source: /note="Description of Combined DNA/RNA Molecule: Synthetic oligonucleotide"
ccagaacugucauaagauatt

SEQ ID NO: 101 - DNA, 21 bp, Artificial Sequence
  source: /note="Description of Artificial Sequence: Synthetic oligonucleotide"
  source: /note="Description of Combined DNA/RNA Molecule: Synthetic oligonucleotide"
cagaacugucauaagauautt

SEQ ID NO: 102 - DNA, 21 bp, Artificial Sequence
  source: /note="Description of Artificial Sequence: Synthetic oligonucleotide"
  source: /note="Description of Combined DNA/RNA Molecule: Synthetic oligonucleotide"
agaacugucauaagauaugtt

SEQ ID NO: 103 - DNA, 21 bp, Artificial Sequence
  source: /note="Description of Artificial Sequence: Synthetic oligonucleotide"
  source: /note="Description of Combined DNA/RNA Molecule: Synthetic oligonucleotide"
gaacugucauaagauaugatt

SEQ ID NO: 104 - DNA, 21 bp, Artificial Sequence
  source: /note="Description of Artificial Sequence: Synthetic oligonucleotide"
  source: /note="Description of Combined DNA/RNA Molecule: Synthetic oligonucleotide"
aacugucauaagauaugagtt

SEQ ID NO: 105 - DNA, 21 bp, Artificial Sequence
  source: /note="Description of Artificial Sequence: Synthetic oligonucleotide"
  source: /note="Description of Combined DNA/RNA Molecule: Synthetic oligonucleotide"
acugucauaagauaugagctt

SEQ ID NO: 106 - DNA, 21 bp, Artificial Sequence
  source: /note="Description of Artificial Sequence: Synthetic oligonucleotide"
  source: /note="Description of Combined DNA/RNA Molecule: Synthetic oligonucleotide"
cugucauaagauaugagcutt

SEQ ID NO: 107 - DNA, 21 bp, Artificial Sequence
  source: /note="Description of Artificial Sequence: Synthetic oligonucleotide"
  source: /note="Description of Combined DNA/RNA Molecule: Synthetic oligonucleotide"
ugucauaagauaugagcugtt

SEQ ID NO: 108 - DNA, 21 bp, Artificial Sequence
  source: /note="Description of Artificial Sequence: Synthetic oligonucleotide"
  source: /note="Description of Combined DNA/RNA Molecule: Synthetic oligonucleotide"
gucauaagauaugagcugatt

SEQ ID NO: 109 - DNA, 21 bp, Artificial Sequence
  source: /note="Description of Artificial Sequence: Synthetic oligonucleotide"
  source: /note="Description of Combined DNA/RNA Molecule: Synthetic oligonucleotide"
aagauaugagcugaauacctt

SEQ ID NO: 110 - DNA, 21 bp, Artificial Sequence
  source: /note="Description of Artificial Sequence: Synthetic oligonucleotide"
  source: /note="Description of Combined DNA/RNA Molecule: Synthetic oligonucleotide"
ugaauaccgagacagugaatt

SEQ ID NO: 111 - DNA, 21 bp, Artificial Sequence
  source: /note="Description of Artificial Sequence: Synthetic oligonucleotide"
  source: /note="Description of Combined DNA/RNA Molecule: Synthetic oligonucleotide"
ugaaggcugagaaggaaautt

SEQ ID NO: 112 - DNA, 21 bp, Artificial Sequence
  source: /note="Description of Artificial Sequence: Synthetic oligonucleotide"
  source: /note="Description of Combined DNA/RNA Molecule: Synthetic oligonucleotide"
ggcugagaaggaaaucccutt

SEQ ID NO: 113 - DNA, 21 bp, Artificial Sequence
  source: /note="Description of Artificial Sequence: Synthetic oligonucleotide"
  source: /note="Description of Combined DNA/RNA Molecule: Synthetic oligonucleotide"
cggacaguucccguauucutt

SEQ ID NO: 114 - DNA, 21 bp, Artificial Sequence
  source: /note="Description of Artificial Sequence: Synthetic oligonucleotide"
  source: /note="Description of Combined DNA/RNA Molecule: Synthetic oligonucleotide"
ggacaguucccguauucuutt

SEQ ID NO: 115 - DNA, 21 bp, Artificial Sequence
  source: /note="Description of Artificial Sequence: Synthetic oligonucleotide"
  source: /note="Description of Combined DNA/RNA Molecule: Synthetic oligonucleotide"
gacaguucccguauucuugtt

SEQ ID NO: 116 - DNA, 21 bp, Artificial Sequence
  source: /note="Description of Artificial Sequence: Synthetic oligonucleotide"
  source: /note="Description of Combined DNA/RNA Molecule: Synthetic oligonucleotide"
acaguucccguauucuuggtt

SEQ ID NO: 117 - DNA, 21 bp, Artificial Sequence
  source: /note="Description of Artificial Sequence: Synthetic oligonucleotide"
  source: /note="Description of Combined DNA/RNA Molecule: Synthetic oligonucleotide"
gccucugggucauuuacagtt

SEQ ID NO: 118 - DNA, 21 bp, Artificial Sequence
  source: /note="Description of Artificial Sequence: Synthetic oligonucleotide"
  source: /note="Description of Combined DNA/RNA Molecule: Synthetic oligonucleotide"
ccauuguccucuccaaacutt

SEQ ID NO: 119 - DNA, 21 bp, Artificial Sequence
  source: /note="Description of Artificial Sequence: Synthetic oligonucleotide"
  source: /note="Description of Combined DNA/RNA Molecule: Synthetic oligonucleotide"
cauuguccucuccaaacugtt

SEQ ID NO: 120 - DNA, 21 bp, Artificial Sequence
  source: /note="Description of Artificial Sequence: Synthetic oligonucleotide"
  source: /note="Description of Combined DNA/RNA Molecule: Synthetic oligonucleotide"
auuguccucuccaaacugatt

SEQ ID NO: 121 - DNA, 21 bp, Artificial Sequence
  source: /note="Description of Artificial Sequence: Synthetic oligonucleotide"
  source: /note="Description of Combined DNA/RNA Molecule: Synthetic oligonucleotide"
uuguccucuccaaacugaatt

SEQ ID NO: 122 - DNA, 21 bp, Artificial Sequence
  source: /note="Description of Artificial Sequence: Synthetic oligonucleotide"
  source: /note="Description of Combined DNA/RNA Molecule: Synthetic oligonucleotide"
ucuccaaacugaacccagatt

SEQ ID NO: 123 - DNA, 21 bp, Artificial Sequence
  source: /note="Description of Artificial Sequence: Synthetic oligonucleotide"
  source: /note="Description of Combined DNA/RNA Molecule: Synthetic oligonucleotide"
caaacugaacccagagaautt

SEQ ID NO: 124 - DNA, 21 bp, Artificial Sequence
  source: /note="Description of Artificial Sequence: Synthetic oligonucleotide"
  source: /note="Description of Combined DNA/RNA Molecule: Synthetic oligonucleotide"
aaacugaacccagagaauctt

SEQ ID NO: 125 - DNA, 21 bp, Artificial Sequence
  source: /note="Description of Artificial Sequence: Synthetic oligonucleotide"
  source: /note="Description of Combined DNA/RNA Molecule: Synthetic oligonucleotide"
cccagagaaucuggaacuctt

SEQ ID NO: 126 - DNA, 21 bp, Artificial Sequence
  source: /note="Description of Artificial Sequence: Synthetic oligonucleotide"
  source: /note="Description of Combined DNA/RNA Molecule: Synthetic oligonucleotide"
gucgccaaugccuucaucatt

SEQ ID NO: 127 - DNA, 21 bp, Artificial Sequence
  source: /note="Description of Artificial Sequence: Synthetic oligonucleotide"
  source: /note="Description of Combined DNA/RNA Molecule: Synthetic oligonucleotide"
ccaaugccuucaucaucugtt

SEQ ID NO: 128 - DNA, 21 bp, Artificial Sequence
  source: /note="Description of Artificial Sequence: Synthetic oligonucleotide"
  source: /note="Description of Combined DNA/RNA Molecule: Synthetic oligonucleotide"
aaugccuucaucaucugugtt

SEQ ID NO: 129 - DNA, 21 bp, Artificial Sequence
  source: /note="Description of Artificial Sequence: Synthetic oligonucleotide"
  source: /note="Description of Combined DNA/RNA Molecule: Synthetic oligonucleotide"
augccuucaucaucuguggtt

SEQ ID NO: 130 - DNA, 21 bp, Artificial Sequence
  source: /note="Description of Artificial Sequence: Synthetic oligonucleotide"
  source: /note="Description of Combined DNA/RNA Molecule: Synthetic oligonucleotide"
guggcaccuuguacaccgutt

SEQ ID NO: 131 - DNA, 21 bp, Artificial Sequence
  source: /note="Description of Artificial Sequence: Synthetic oligonucleotide"
  source: /note="Description of Combined DNA/RNA Molecule: Synthetic oligonucleotide"
accgucaacuuugcuuaugtt

SEQ ID NO: 132 - DNA, 21 bp, Artificial Sequence
  source: /note="Description of Artificial Sequence: Synthetic oligonucleotide"
  source: /note="Description of Combined DNA/RNA Molecule: Synthetic oligonucleotide"
ccgucaacuuugcuuaugatt

SEQ ID NO: 133 - DNA, 21 bp, Artificial Sequence
  source: /note="Description of Artificial Sequence: Synthetic oligonucleotide"
  source: /note="Description of Combined DNA/RNA Molecule: Synthetic oligonucleotide"
cgucaacuuugcuuaugactt

SEQ ID NO: 134 - DNA, 21 bp, Artificial Sequence
  source: /note="Description of Artificial Sequence: Synthetic oligonucleotide"
  source: /note="Description of Combined DNA/RNA Molecule: Synthetic oligonucleotide"
gucaacuuugcuuaugacatt

SEQ ID NO: 135 - DNA, 21 bp, Artificial Sequence
  source: /note="Description of Artificial Sequence: Synthetic oligonucleotide"
  source: /note="Description of Combined DNA/RNA Molecule: Synthetic oligonucleotide"
ucaacuuugcuuaugacactt

SEQ ID NO: 136 - DNA, 21 bp, Artificial Sequence
  source: /note="Description of Artificial Sequence: Synthetic oligonucleotide"
  source: /note="Description of Combined DNA/RNA Molecule: Synthetic oligonucleotide"
cccugaccaucccauucaatt

SEQ ID NO: 137 - DNA, 21 bp, Artificial Sequence
  source: /note="Description of Artificial Sequence: Synthetic oligonucleotide"
  source: /note="Description of Combined DNA/RNA Molecule: Synthetic oligonucleotide"
ccugaccaucccauucaagtt

SEQ ID NO: 138 - DNA, 21 bp, Artificial Sequence
  source: /note="Description of Artificial Sequence: Synthetic oligonucleotide"
  source: /note="Description of Combined DNA/RNA Molecule: Synthetic oligonucleotide"
cugaccaucccauucaagatt

SEQ ID NO: 139 - DNA, 21 bp, Artificial Sequence
  source: /note="Description of Artificial Sequence: Synthetic oligonucleotide"
  source: /note="Description of Combined DNA/RNA Molecule: Synthetic oligonucleotide"
ccaucccauucaagaaccgtt

SEQ ID NO: 140 - DNA, 21 bp, Artificial Sequence
  source: /note="Description of Artificial Sequence: Synthetic oligonucleotide"
  source: /note="Description of Combined DNA/RNA Molecule: Synthetic oligonucleotide"
aucccauucaagaaccgcutt

SEQ ID NO: 141 - DNA, 21 bp, Artificial Sequence
  source: /note="Description of Artificial Sequence: Synthetic oligonucleotide"
  source: /note="Description of Combined DNA/RNA Molecule: Synthetic oligonucleotide"
ucccauucaagaaccgcuatt

SEQ ID NO: 142 - DNA, 21 bp, Artificial Sequence
  source: /note="Description of Artificial Sequence: Synthetic oligonucleotide"
  source: /note="Description of Combined DNA/RNA Molecule: Synthetic oligonucleotide"
cccauucaagaaccgcuautt

SEQ ID NO: 143 - DNA, 21 bp, Artificial Sequence
  source: /note="Description of Artificial Sequence: Synthetic oligonucleotide"
  source: /note="Description of Combined DNA/RNA Molecule: Synthetic oligonucleotide"
aaguacagcagcaugauugtt

SEQ ID NO: 144 - DNA, 21 bp, Artificial Sequence
  source: /note="Description of Artificial Sequence: Synthetic oligonucleotide"
  source: /note="Description of Combined DNA/RNA Molecule: Synthetic oligonucleotide"
aguacagcagcaugauugatt

SEQ ID NO: 145 - DNA, 21 bp, Artificial Sequence
  source: /note="Description of Artificial Sequence: Synthetic oligonucleotide"
  source: /note="Description of Combined DNA/RNA Molecule: Synthetic oligonucleotide"
acagcagcaugauugacuatt

SEQ ID NO: 146 - DNA, 21 bp, Artificial Sequence
  source: /note="Description of Artificial Sequence: Synthetic oligonucleotide"
  source: /note="Description of Combined DNA/RNA Molecule: Synthetic oligonucleotide"
cagcagcaugauugacuactt

SEQ ID NO: 147 - DNA, 21 bp, Artificial Sequence
  source: /note="Description of Artificial Sequence: Synthetic oligonucleotide"
  source: /note="Description of Combined DNA/RNA Molecule: Synthetic oligonucleotide"
agcagcaugauugacuacatt

SEQ ID NO: 148 - DNA, 21 bp, Artificial Sequence
  source: /note="Description of Artificial Sequence: Synthetic oligonucleotide"
  source: /note="Description of Combined DNA/RNA Molecule: Synthetic oligonucleotide"
gcagcaugauugacuacaatt

SEQ ID NO: 149 - DNA, 21 bp, Artificial Sequence
  source: /note="Description of Artificial Sequence: Synthetic oligonucleotide"
  source: /note="Description of Combined DNA/RNA Molecule: Synthetic oligonucleotide"
cagcaugauugacuacaactt

SEQ ID NO: 150 - DNA, 21 bp, Artificial Sequence
  source: /note="Description of Artificial Sequence: Synthetic oligonucleotide"
  source: /note="Description of Combined DNA/RNA Molecule: Synthetic oligonucleotide"
agcaugauugacuacaacctt

SEQ ID NO: 151 - DNA, 21 bp, Artificial Sequence
  source: /note="Description of Artificial Sequence: Synthetic oligonucleotide"
  source: /note="Description of Combined DNA/RNA Molecule: Synthetic oligonucleotide"
gcaugauugacuacaaccctt

SEQ ID NO: 152 - DNA, 21 bp, Artificial Sequence
  source: /note="Description of Artificial Sequence: Synthetic oligonucleotide"
  source: /note="Description of Combined DNA/RNA Molecule: Synthetic oligonucleotide"
ucuuugccugggacaacuutt

SEQ ID NO: 153 - DNA, 21 bp, Artificial Sequence
  source: /note="Description of Artificial Sequence: Synthetic oligonucleotide"
  source: /note="Description of Combined DNA/RNA Molecule: Synthetic oligonucleotide"
uugccugggacaacuugaatt

SEQ ID NO: 154 - DNA, 21 bp, Artificial Sequence
  source: /note="Description of Artificial Sequence: Synthetic oligonucleotide"
  source: /note="Description of Combined DNA/RNA Molecule: Synthetic oligonucleotide"
ccugggacaacuugaacautt

SEQ ID NO: 155 - DNA, 21 bp, Artificial Sequence
  source: /note="Description of Artificial Sequence: Synthetic oligonucleotide"
  source: /note="Description of Combined DNA/RNA Molecule: Synthetic oligonucleotide"
cugggacaacuugaacaugtt

SEQ ID NO: 156 - DNA, 21 bp, Artificial Sequence
  source: /note="Description of Artificial Sequence: Synthetic oligonucleotide"
  source: /note="Description of Combined DNA/RNA Molecule: Synthetic oligonucleotide"
ugggacaacuugaacauggtt

SEQ ID NO: 157 - DNA, 21 bp, Artificial Sequence
  source: /note="Description of Artificial Sequence: Synthetic oligonucleotide"
  source: /note="Description of Combined DNA/RNA Molecule: Synthetic oligonucleotide"
gggacaacuugaacauggutt

SEQ ID NO: 158 - DNA, 21 bp, Artificial Sequence
  source: /note="Description of Artificial Sequence: Synthetic oligonucleotide"
  source: /note="Description of Combined DNA/RNA Molecule: Synthetic oligonucleotide"
ggacaacuugaacaugguctt

SEQ ID NO: 159 - DNA, 21 bp, Artificial Sequence
  source: /note="Description of Artificial Sequence: Synthetic oligonucleotide"
  source: /note="Description of Combined DNA/RNA Molecule: Synthetic oligonucleotide"
gacaacuugaacauggucatt

SEQ ID NO: 160 - DNA, 21 bp, Artificial Sequence
  source: /note="Description of Artificial Sequence: Synthetic oligonucleotide"
  source: /note="Description of Combined DNA/RNA Molecule: Synthetic oligonucleotide"
acaacuugaacauggucactt

SEQ ID NO: 161 - DNA, 21 bp, Artificial Sequence
  source: /note="Description of Artificial Sequence: Synthetic oligonucleotide"
  source: /note="Description of Combined DNA/RNA Molecule: Synthetic oligonucleotide"
caacuugaacauggucacutt

SEQ ID NO: 162 - DNA, 21 bp, Artificial Sequence
  source: /note="Description of Artificial Sequence: Synthetic oligonucleotide"
  source: /note="Description of Combined DNA/RNA Molecule: Synthetic oligonucleotide"
acuugaacauggucacuuatt

SEQ ID NO: 163 - DNA, 21 bp, Artificial Sequence
  source: /note="Description of Artificial Sequence: Synthetic oligonucleotide"
  source: /note="Description of Combined DNA/RNA Molecule: Synthetic oligonucleotide"
cuugaacauggucacuuautt

SEQ ID NO: 164 - DNA, 21 bp, Artificial Sequence
  source: /note="Description of Artificial Sequence: Synthetic oligonucleotide"
  source: /note="Description of Combined DNA/RNA Molecule: Synthetic oligonucleotide"
uugaacauggucacuuaugtt

SEQ ID NO: 165 - DNA, 21 bp, Artificial Sequence
  source: /note="Description of Artificial Sequence: Synthetic oligonucleotide"
  source: /note="Description of Combined DNA/RNA Molecule: Synthetic oligonucleotide"
ugaacauggucacuuaugatt

SEQ ID NO: 166 - DNA, 21 bp, Artificial Sequence
  source: /note="Description of Artificial Sequence: Synthetic oligonucleotide"
  source: /note="Description of Combined DNA/RNA Molecule: Synthetic oligonucleotide"
gaacauggucacuuaugactt

SEQ ID NO: 167 - DNA, 21 bp, Artificial Sequence
  source: /note="Description of Artificial Sequence: Synthetic oligonucleotide"
  source: /note="Description of Combined DNA/RNA Molecule: Synthetic oligonucleotide"
aacauggucacuuaugacatt

SEQ ID NO: 168 - DNA, 21 bp, Artificial Sequence
  source: /note="Description of Artificial Sequence: Synthetic oligonucleotide"
  source: /note="Description of Combined DNA/RNA Molecule: Synthetic oligonucleotide"
acauggucacuuaugacautt

SEQ ID NO: 169 - DNA, 21 bp, Artificial Sequence
  source: /note="Description of Artificial Sequence: Synthetic oligonucleotide"
  source: /note="Description of Combined DNA/RNA Molecule: Synthetic oligonucleotide"
cauggucacuuaugacauctt

SEQ ID NO: 170 - DNA, 21 bp, Artificial Sequence
  source: /note="Description of Artificial Sequence: Synthetic oligonucleotide"
  source: /note="Description of Combined DNA/RNA Molecule: Synthetic oligonucleotide"
uggucacuuaugacaucaatt

SEQ ID NO: 171 - DNA, 21 bp, Artificial Sequence
  source: /note="Description of Artificial Sequence: Synthetic oligonucleotide"
  source: /note="Description of Combined DNA/RNA Molecule: Synthetic oligonucleotide"
ggucacuuaugacaucaagtt

SEQ ID NO: 172 - DNA, 21 bp, Artificial Sequence
  source: /note="Description of Artificial Sequence: Synthetic oligonucleotide"
  source: /note="Description of Combined DNA/RNA Molecule: Synthetic oligonucleotide"
gucacuuaugacaucaagctt

SEQ ID NO: 173 - DNA, 21 bp, Artificial Sequence
  source: /note="Description of Artificial Sequence: Synthetic oligonucleotide"
  source: /note="Description of Combined DNA/RNA Molecule: Synthetic oligonucleotide"
acaucaagcucuccaagautt

SEQ ID NO: 174 - DNA, 21 bp, Artificial Sequence
  source: /note="Description of Artificial Sequence: Synthetic oligonucleotide"
  source: /note="Description of Combined DNA/RNA Molecule: Synthetic oligonucleotide"
aucaagcucuccaagaugutt

SEQ ID NO: 175 - DNA, 21 bp, Artificial Sequence
  source: /note="Description of Artificial Sequence: Synthetic oligonucleotide"
  source: /note="Description of Combined DNA/RNA Molecule: Synthetic oligonucleotide"
ucaagcucuccaagaugugtt

SEQ ID NO: 176 - DNA, 21 bp, Artificial Sequence
  source: /note="Description of Artificial Sequence: Synthetic oligonucleotide"
  source: /note="Description of Combined DNA/RNA Molecule: Synthetic oligonucleotide"
agcucuccaagaugugaaatt

SEQ ID NO: 177 - DNA, 21 bp, Artificial Sequence
  source: /note="Description of Artificial Sequence: Synthetic oligonucleotide"
  source: /note="Description of Combined DNA/RNA Molecule: Synthetic oligonucleotide"
gcucuccaagaugugaaaatt

SEQ ID NO: 178 - DNA, 21 bp, Artificial Sequence
  source: /note="Description of Artificial Sequence: Synthetic oligonucleotide"
  source: /note="Description of Combined DNA/RNA Molecule: Synthetic oligonucleotide"
cucuccaagaugugaaaagtt

SEQ ID NO: 179 - DNA, 21 bp, Artificial Sequence
  source: /note="Description of Artificial Sequence: Synthetic oligonucleotide"
  source: /note="Description of Combined DNA/RNA Molecule: Synthetic oligonucleotide"
ucuccaagaugugaaaagctt

SEQ ID NO: 180 - DNA, 21 bp, Artificial Sequence
  source: /note="Description of Artificial Sequence: Synthetic oligonucleotide"
  source: /note="Description of Combined DNA/RNA Molecule: Synthetic oligonucleotide"
uccaagaugugaaaagccutt

SEQ ID NO: 181 - DNA, 21 bp, Artificial Sequence
  source: /note="Description of Artificial Sequence: Synthetic oligonucleotide"
  source: /note="Description of Combined DNA/RNA Molecule: Synthetic oligonucleotide"
ccaagaugugaaaagccuctt

SEQ ID NO: 182 - DNA, 21 bp, Artificial Sequence
  source: /note="Description of Artificial Sequence: Synthetic oligonucleotide"
  source: /note="Description of Combined DNA/RNA Molecule: Synthetic oligonucleotide"
ggaugaacauggucaccautt

SEQ ID NO: 183 - DNA, 21 bp, Artificial Sequence
  source: /note="Description of Artificial Sequence: Synthetic oligonucleotide"
  source: /note="Description of Combined DNA/RNA Molecule: Synthetic oligonucleotide"
caggaauuguagucugaggtt

SEQ ID NO: 184 - DNA, 21 bp, Artificial Sequence
  source: /note="Description of Artificial Sequence: Synthetic oligonucleotide"
  source: /note="Description of Combined DNA/RNA Molecule: Synthetic oligonucleotide"
aggaauuguagucugagggtt

SEQ ID NO: 185 - DNA, 21 bp, Artificial Sequence
  source: /note="Description of Artificial Sequence: Synthetic oligonucleotide"
  source: /note="Description of Combined DNA/RNA Molecule: Synthetic oligonucleotide"
ucuucugucagcauuuaugtt

SEQ ID NO: 186 - DNA, 21 bp, Artificial Sequence
  source: /note="Description of Artificial Sequence: Synthetic oligonucleotide"
  source: /note="Description of Combined DNA/RNA Molecule: Synthetic oligonucleotide"
cuucugucagcauuuauggtt

SEQ ID NO: 187 - DNA, 21 bp, Artificial Sequence
  source: /note="Description of Artificial Sequence: Synthetic oligonucleotide"
  source: /note="Description of Combined DNA/RNA Molecule: Synthetic oligonucleotide"
uucugucagcauuuaugggtt

SEQ ID NO: 188 - DNA, 21 bp, Artificial Sequence
  source: /note="Description of Artificial Sequence: Synthetic oligonucleotide"
  source: /note="Description of Combined DNA/RNA Molecule: Synthetic oligonucleotide"
cugucagcauuuaugggautt

SEQ ID NO: 189 - DNA, 21 bp, Artificial Sequence
  source: /note="Description of Artificial Sequence: Synthetic oligonucleotide"
  source: /note="Description of Combined DNA/RNA Molecule: Synthetic oligonucleotide"
ugucagcauuuaugggaugtt

SEQ ID NO: 190 - DNA, 21 bp, Artificial Sequence
  source: /note="Description of Artificial Sequence: Synthetic oligonucleotide"
  source: /note="Description of Combined DNA/RNA Molecule: Synthetic oligonucleotide"
gucagcauuuaugggaugutt

SEQ ID NO: 191 - DNA, 21 bp, Artificial Sequence
  source: /note="Description of Artificial Sequence: Synthetic oligonucleotide"
  source: /note="Description of Combined DNA/RNA Molecule: Synthetic oligonucleotide"
ucagcauuuaugggauguutt

SEQ ID NO: 192 - DNA, 21 bp, Artificial Sequence
  source: /note="Description of Artificial Sequence: Synthetic oligonucleotide"
  source: /note="Description of Combined DNA/RNA Molecule: Synthetic oligonucleotide"
cagcauuuaugggauguuutt

SEQ ID NO: 193 - DNA, 21 bp, Artificial Sequence
  source: /note="Description of Artificial Sequence: Synthetic oligonucleotide"
  source: /note="Description of Combined DNA/RNA Molecule: Synthetic oligonucleotide"
agcauuuaugggauguuuatt

SEQ ID NO: 194 - DNA, 21 bp, Artificial Sequence
  source: /note="Description of Artificial Sequence: Synthetic oligonucleotide"
  source: /note="Description of Combined DNA/RNA Molecule: Synthetic oligonucleotide"
gcauuuaugggauguuuaatt

SEQ ID NO: 195 - DNA, 21 bp, Artificial Sequence
  source: /note="Description of Artificial Sequence: Synthetic oligonucleotide"
  source: /note="Description of Combined DNA/RNA Molecule: Synthetic oligonucleotide"
cauuuaugggauguuuaautt

SEQ ID NO: 196 - DNA, 21 bp, Artificial Sequence
  source: /note="Description of Artificial Sequence: Synthetic oligonucleotide"
  source: /note="Description of Combined DNA/RNA Molecule: Synthetic oligonucleotide"
auuuaugggauguuuaaugtt

SEQ ID NO: 197 - DNA, 21 bp, Artificial Sequence
  source: /note="Description of Artificial Sequence: Synthetic oligonucleotide"
  source: /note="Description of Combined DNA/RNA Molecule: Synthetic oligonucleotide"
uuuaugggauguuuaaugatt

SEQ ID NO: 198 - DNA, 21 bp, Artificial Sequence
  source: /note="Description of Artificial Sequence: Synthetic oligonucleotide"
  source: /note="Description of Combined DNA/RNA Molecule: Synthetic oligonucleotide"
uuaugggauguuuaaugactt

SEQ ID NO: 199 - DNA, 21 bp, Artificial Sequence
  source: /note="Description of Artificial Sequence: Synthetic oligonucleotide"
  source: /note="Description of Combined DNA/RNA Molecule: Synthetic oligonucleotide"
augggauguuuaaugacautt

SEQ ID NO: 200 - DNA, 21 bp, Artificial Sequence
  source: /note="Description of Artificial Sequence: Synthetic oligonucleotide"
  source: /note="Description of Combined DNA/RNA Molecule: Synthetic oligonucleotide"
ugggauguuuaaugacauatt

SEQ ID NO: 201 - DNA, 21 bp, Artificial Sequence
  source: /note="Description of Artificial Sequence: Synthetic oligonucleotide"
  source: /note="Description of Combined DNA/RNA Molecule: Synthetic oligonucleotide"
gggauguuuaaugacauagtt

SEQ ID NO: 202 - DNA, 21 bp, Artificial Sequence
  source: /note="Description of Artificial Sequence: Synthetic oligonucleotide"
  source: /note="Description of Combined DNA/RNA Molecule: Synthetic oligonucleotide"
ggauguuuaaugacauagutt

SEQ ID NO: 203 - DNA, 21 bp, Artificial Sequence
  source: /note="Description of Artificial Sequence: Synthetic oligonucleotide"
  source: /note="Description of Combined DNA/RNA Molecule: Synthetic oligonucleotide"
gauguuuaaugacauaguutt

SEQ ID NO: 204 - DNA, 21 bp, Artificial Sequence
  source: /note="Description of Artificial Sequence: Synthetic oligonucleotide"
  source: /note="Description of Combined DNA/RNA Molecule: Synthetic oligonucleotide"
auguuuaaugacauaguuctt

SEQ ID NO: 205 - DNA, 21 bp, Artificial Sequence
  source: /note="Description of Artificial Sequence: Synthetic oligonucleotide"
  source: /note="Description of Combined DNA/RNA Molecule: Synthetic oligonucleotide"
uguuuaaugacauaguucatt

SEQ ID NO: 206 - DNA, 21 bp, Artificial Sequence
  source: /note="Description of Artificial Sequence: Synthetic oligonucleotide"
  source: /note="Description of Combined DNA/RNA Molecule: Synthetic oligonucleotide"
guuuaaugacauaguucaatt

SEQ ID NO: 207 - DNA, 21 bp, Artificial Sequence
  source: /note="Description of Artificial Sequence: Synthetic oligonucleotide"
  source: /note="Description of Combined DNA/RNA Molecule: Synthetic oligonucleotide"
uuuaaugacauaguucaagtt

SEQ ID NO: 208 - DNA, 21 bp, Artificial Sequence
  source: /note="Description of Artificial Sequence: Synthetic oligonucleotide"
  source: /note="Description of Combined DNA/RNA Molecule: Synthetic oligonucleotide"
uuaaugacauaguucaagutt

SEQ ID NO: 209 - DNA, 21 bp, Artificial Sequence
  source: /note="Description of Artificial Sequence: Synthetic oligonucleotide"
  source: /note="Description of Combined DNA/RNA Molecule: Synthetic oligonucleotide"
uaaugacauaguucaaguutt

SEQ ID NO: 210 - DNA, 21 bp, Artificial Sequence
  source: /note="Description of Artificial Sequence: Synthetic oligonucleotide"
  source: /note="Description of Combined DNA/RNA Molecule: Synthetic oligonucleotide"
aaugacauaguucaaguuutt

SEQ ID NO: 211 - DNA, 21 bp, Artificial Sequence
  source: /note="Description of Artificial Sequence: Synthetic oligonucleotide"
  source: /note="Description of Combined DNA/RNA Molecule: Synthetic oligonucleotide"
augacauaguucaaguuuutt

SEQ ID NO: 212 - DNA, 21 bp, Artificial Sequence
  source: /note="Description of Artificial Sequence: Synthetic oligonucleotide"
  source: /note="Description of Combined DNA/RNA Molecule: Synthetic oligonucleotide"
ugacauaguucaaguuuuctt

SEQ ID NO: 213 - DNA, 21 bp, Artificial Sequence
  source: /note="Description of Artificial Sequence: Synthetic oligonucleotide"
  source: /note="Description of Combined DNA/RNA Molecule: Synthetic oligonucleotide"
gacauaguucaaguuuucutt

SEQ ID NO: 214 - DNA, 21 bp, Artificial Sequence
  source: /note="Description of Artificial Sequence: Synthetic oligonucleotide"
  source: /note="Description of Combined DNA/RNA Molecule: Synthetic oligonucleotide"
acauaguucaaguuuucuutt

SEQ ID NO: 215 - DNA, 21 bp, Artificial Sequence
  source: /note="Description of Artificial Sequence: Synthetic oligonucleotide"
  source: /note="Description of Combined DNA/RNA Molecule: Synthetic oligonucleotide"
cauaguucaaguuuucuugtt

SEQ ID NO: 216 - DNA, 21 bp, Artificial Sequence
  source: /note="Description of Artificial Sequence: Synthetic oligonucleotide"
  source: /note="Description of Combined DNA/RNA Molecule: Synthetic oligonucleotide"
auaguucaaguuuucuugutt

SEQ ID NO: 217 - DNA, 21 bp, Artificial Sequence
  source: /note="Description of Artificial Sequence: Synthetic oligonucleotide"
  source: /note="Description of Combined DNA/RNA Molecule: Synthetic oligonucleotide"
uaguucaaguuuucuugugtt

SEQ ID NO: 218 - DNA, 21 bp, Artificial Sequence
  source: /note="Description of Artificial Sequence: Synthetic oligonucleotide"
  source: /note="Description of Combined DNA/RNA Molecule: Synthetic oligonucleotide"
aguucaaguuuucuugugatt

SEQ ID NO: 219 - DNA, 21 bp, Artificial Sequence
  source: /note="Description of Artificial Sequence: Synthetic oligonucleotide"
  source: /note="Description of Combined DNA/RNA Molecule: Synthetic oligonucleotide"
guucaaguuuucuugugautt

SEQ ID NO: 220 - DNA, 21 bp, Artificial Sequence
  source: /note="Description of Artificial Sequence: Synthetic oligonucleotide"
  source: /note="Description of Combined DNA/RNA Molecule: Synthetic oligonucleotide"
uucaaguuuucuugugauutt

SEQ ID NO: 221 - DNA, 21 bp, Artificial Sequence
  source: /note="Description of Artificial Sequence: Synthetic oligonucleotide"
  source: /note="Description of Combined DNA/RNA Molecule: Synthetic oligonucleotide"
ucaaguuuucuugugauuutt

SEQ ID NO: 222 - DNA, 21 bp, Artificial Sequence
  source: /note="Description of Artificial Sequence: Synthetic oligonucleotide"
  source: /note="Description of Combined DNA/RNA Molecule: Synthetic oligonucleotide"
caaguuuucuugugauuugtt

SEQ ID NO: 223 - DNA, 21 bp, Artificial Sequence
  source: /note="Description of Artificial Sequence: Synthetic oligonucleotide"
  source: /note="Description of Combined DNA/RNA Molecule: Synthetic oligonucleotide"
aaguuuucuugugauuuggtt

SEQ ID NO: 224 - DNA, 21 bp, Artificial Sequence
  source: /note="Description of Artificial Sequence: Synthetic oligonucleotide"
  source: /note="Description of Combined DNA/RNA Molecule: Synthetic oligonucleotide"
aguuuucuugugauuugggtt

SEQ ID NO: 225 - DNA, 21 bp, Artificial Sequence
  source: /note="Description of Artificial Sequence: Synthetic oligonucleotide"
  source: /note="Description of Combined DNA/RNA Molecule: Synthetic oligonucleotide"
guuuucuugugauuuggggtt

SEQ ID NO: 226 - DNA, 21 bp, Artificial Sequence
  source: /note="Description of Artificial Sequence: Synthetic oligonucleotide"
  source: /note="Description of Combined DNA/RNA Molecule: Synthetic oligonucleotide"
ugugauuuggggcaaaagctt

SEQ ID NO: 227 - DNA, 21 bp, Artificial Sequence
  source: /note="Description of Artificial Sequence: Synthetic oligonucleotide"
  source: /note="Description of Combined DNA/RNA Molecule: Synthetic oligonucleotide"
gugauuuggggcaaaagcutt

SEQ ID NO: 228 - DNA, 21 bp, Artificial Sequence
  source: /note="Description of Artificial Sequence: Synthetic oligonucleotide"
  source: /note="Description of Combined DNA/RNA Molecule: Synthetic oligonucleotide"
ugauuuggggcaaaagcugtt

SEQ ID NO: 229 - DNA, 21 bp, Artificial Sequence
  source: /note="Description of Artificial Sequence: Synthetic oligonucleotide"
  source: /note="Description of Combined DNA/RNA Molecule: Synthetic oligonucleotide"
uaguuucuuccugaaaacctt

SEQ ID NO: 230 - DNA, 21 bp, Artificial Sequence
  source: /note="Description of Artificial Sequence: Synthetic oligonucleotide"
  source: /note="Description of Combined DNA/RNA Molecule: Synthetic oligonucleotide"
aguuucuuccugaaaaccatt

SEQ ID NO: 231 - DNA, 21 bp, Artificial Sequence
  source: /note="Description of Artificial Sequence: Synthetic oligonucleotide"
  source: /note="Description of Combined DNA/RNA Molecule: Synthetic oligonucleotide"
guuucuuccugaaaaccautt

SEQ ID NO: 232 - DNA, 21 bp, Artificial Sequence
  source: /note="Description of Artificial Sequence: Synthetic oligonucleotide"
  source: /note="Description of Combined DNA/RNA Molecule: Synthetic oligonucleotide"
uuucuuccugaaaaccauutt

SEQ ID NO: 233 - DNA, 21 bp, Artificial Sequence
  source: /note="Description of Artificial Sequence: Synthetic oligonucleotide"
  source: /note="Description of Combined DNA/RNA Molecule: Synthetic oligonucleotide"
uucuuccugaaaaccauugtt

SEQ ID NO: 234 - DNA, 21 bp, Artificial Sequence
  source: /note="Description of Artificial Sequence: Synthetic oligonucleotide"
  source: /note="Description of Combined DNA/RNA Molecule: Synthetic oligonucleotide"
ucuuccugaaaaccauugctt

SEQ ID NO: 235 - DNA, 21 bp, Artificial Sequence
  source: /note="Description of Artificial Sequence: Synthetic oligonucleotide"
  source: /note="Description of Combined DNA/RNA Molecule: Synthetic oligonucleotide"
cuuccugaaaaccauugcutt

SEQ ID NO: 236 - DNA, 21 bp, Artificial Sequence
  source: /note="Description of Artificial Sequence: Synthetic oligonucleotide"
  source: /note="Description of Combined DNA/RNA Molecule: Synthetic oligonucleotide"
uuccugaaaaccauugcuctt

SEQ ID NO: 237 - DNA, 21 bp, Artificial Sequence
  source: /note="Description of Artificial Sequence: Synthetic oligonucleotide"
  source: /note="Description of Combined DNA/RNA Molecule: Synthetic oligonucleotide"
uccugaaaaccauugcucutt

SEQ ID NO: 238 - DNA, 21 bp, Artificial Sequence
  source: /note="Description of Artificial Sequence: Synthetic oligonucleotide"
  source: /note="Description of Combined DNA/RNA Molecule: Synthetic oligonucleotide"
ccugaaaaccauugcucuutt

SEQ ID NO: 239 - DNA, 21 bp, Artificial Sequence
  source: /note="Description of Artificial Sequence: Synthetic oligonucleotide"
  source: /note="Description of Combined DNA/RNA Molecule: Synthetic oligonucleotide"
cugaaaaccauugcucuugtt

SEQ ID NO: 240 - DNA, 21 bp, Artificial Sequence
  source: /note="Description of Artificial Sequence: Synthetic oligonucleotide"
  source: /note="Description of Combined DNA/RNA Molecule: Synthetic oligonucleotide"
aaccauugcucuugcaugutt

SEQ ID NO: 241 - DNA, 21 bp, Artificial Sequence
  source: /note="Description of Artificial Sequence: Synthetic oligonucleotide"
  source: /note="Description of Combined DNA/RNA Molecule: Synthetic oligonucleotide"
ccauugcucuugcauguuatt

SEQ ID NO: 242 - DNA, 21 bp, Artificial Sequence
  source: /note="Description of Artificial Sequence: Synthetic oligonucleotide"
  source: /note="Description of Combined DNA/RNA Molecule: Synthetic oligonucleotide"
cauugcucuugcauguuactt

SEQ ID NO: 243 - DNA, 21 bp, Artificial Sequence
  source: /note="Description of Artificial Sequence: Synthetic oligonucleotide"
  source: /note="Description of Combined DNA/RNA Molecule: Synthetic oligonucleotide"
auugcucuugcauguuacatt

SEQ ID NO: 244 - DNA, 21 bp, Artificial Sequence
  source: /note="Description of Artificial Sequence: Synthetic oligonucleotide"
  source: /note="Description of Combined DNA/RNA Molecule: Synthetic oligonucleotide"
uugcucuugcauguuacautt

SEQ ID NO: 245 - DNA, 21 bp, Artificial Sequence
  source: /note="Description of Artificial Sequence: Synthetic oligonucleotide"
  source: /note="Description of Combined DNA/RNA Molecule: Synthetic oligonucleotide"
ugcucuugcauguuacaugtt

SEQ ID NO: 246 - DNA, 21 bp, Artificial Sequence
  source: /note="Description of Artificial Sequence: Synthetic oligonucleotide"
  source: /note="Description of Combined DNA/RNA Molecule: Synthetic oligonucleotide"
gcucuugcauguuacauggtt

SEQ ID NO: 247 - DNA, 21 bp, Artificial Sequence
  source: /note="Description of Artificial Sequence: Synthetic oligonucleotide"
  source: /note="Description of Combined DNA/RNA Molecule: Synthetic oligonucleotide"
cucuugcauguuacauggutt

SEQ ID NO: 248 - DNA, 21 bp, Artificial Sequence
  source: /note="Description of Artificial Sequence: Synthetic oligonucleotide"
  source: /note="Description of Combined DNA/RNA Molecule: Synthetic oligonucleotide"
ucuugcauguuacaugguutt

SEQ ID NO: 249 - DNA, 21 bp, Artificial Sequence
  source: /note="Description of Artificial Sequence: Synthetic oligonucleotide"
  source: /note="Description of Combined DNA/RNA Molecule: Synthetic oligonucleotide"
cuugcauguuacaugguuatt

SEQ ID NO: 250 - DNA, 21 bp, Artificial Sequence
  source: /note="Description of Artificial Sequence: Synthetic oligonucleotide"
  source: /note="Description of Combined DNA/RNA Molecule: Synthetic oligonucleotide"
uugcauguuacaugguuactt

SEQ ID NO: 251 - DNA, 21 bp, Artificial Sequence
  source: /note="Description of Artificial Sequence: Synthetic oligonucleotide"
  source: /note="Description of Combined DNA/RNA Molecule: Synthetic oligonucleotide"
ugcauguuacaugguuacctt

SEQ ID NO: 252 - DNA, 21 bp, Artificial Sequence
  source: /note="Description of Artificial Sequence: Synthetic oligonucleotide"
  source: /note="Description of Combined DNA/RNA Molecule: Synthetic oligonucleotide"
gcauguuacaugguuaccatt

SEQ ID NO: 253 - DNA, 21 bp, Artificial Sequence
  source: /note="Description of Artificial Sequence: Synthetic oligonucleotide"
  source: /note="Description of Combined DNA/RNA Molecule: Synthetic oligonucleotide"
auguuacaugguuaccacatt

SEQ ID NO: 254 - DNA, 21 bp, Artificial Sequence
  source: /note="Description of Artificial Sequence: Synthetic oligonucleotide"
  source: /note="Description of Combined DNA/RNA Molecule: Synthetic oligonucleotide"
uguuacaugguuaccacaatt

SEQ ID NO: 255 - DNA, 21 bp, Artificial Sequence
  source: /note="Description of Artificial Sequence: Synthetic oligonucleotide"
  source: /note="Description of Combined DNA/RNA Molecule: Synthetic oligonucleotide"
ugguuaccacaagccacaatt

SEQ ID NO: 256 - DNA, 21 bp, Artificial Sequence
  source: /note="Description of Artificial Sequence: Synthetic oligonucleotide"
  source: /note="Description of Combined DNA/RNA Molecule: Synthetic oligonucleotide"
gguuaccacaagccacaautt

SEQ ID NO: 257 - DNA, 21 bp, Artificial Sequence
  source: /note="Description of Artificial Sequence: Synthetic oligonucleotide"
  source: /note="Description of Combined DNA/RNA Molecule: Synthetic oligonucleotide"
guuaccacaagccacaauatt

SEQ ID NO: 258 - DNA, 21 bp, Artificial Sequence
  source: /note="Description of Artificial Sequence: Synthetic oligonucleotide"
  source: /note="Description of Combined DNA/RNA Molecule: Synthetic oligonucleotide"
aaaagcauaacuucuaaagtt

SEQ ID NO: 259 - DNA, 21 bp, Artificial Sequence
  source: /note="Description of Artificial Sequence: Synthetic oligonucleotide"
  source: /note="Description of Combined DNA/RNA Molecule: Synthetic oligonucleotide"
aaagcauaacuucuaaaggtt

SEQ ID NO: 260 - DNA, 21 bp, Artificial Sequence
  source: /note="Description of Artificial Sequence: Synthetic oligonucleotide"
  source: /note="Description of Combined DNA/RNA Molecule: Synthetic oligonucleotide"
aagcauaacuucuaaaggatt

SEQ ID NO: 261 - DNA, 21 bp, Artificial Sequence
  source: /note="Description of Artificial Sequence: Synthetic oligonucleotide"
  source: /note="Description of Combined DNA/RNA Molecule: Synthetic oligonucleotide"
agcauaacuucuaaaggaatt

SEQ ID NO: 262 - DNA, 21 bp, Artificial Sequence
  source: /note="Description of Artificial Sequence: Synthetic oligonucleotide"
  source: /note="Description of Combined DNA/RNA Molecule: Synthetic oligonucleotide"
gcauaacuucuaaaggaagtt

SEQ ID NO: 263 - DNA, 21 bp, Artificial Sequence
  source: /note="Description of Artificial Sequence: Synthetic oligonucleotide"
  source: /note="Description of Combined DNA/RNA Molecule: Synthetic oligonucleotide"
cauaacuucuaaaggaagctt

SEQ ID NO: 264 - DNA, 21 bp, Artificial Sequence
  source: /note="Description of Artificial Sequence: Synthetic oligonucleotide"
  source: /note="Description of Combined DNA/RNA Molecule: Synthetic oligonucleotide"
auaacuucuaaaggaagcatt

SEQ ID NO: 265 - DNA, 21 bp, Artificial Sequence
  source: /note="Description of Artificial Sequence: Synthetic oligonucleotide"
  source: /note="Description of Combined DNA/RNA Molecule: Synthetic oligonucleotide"
acuucuaaaggaagcagaatt

SEQ ID NO: 266 - DNA, 21 bp, Artificial Sequence
  source: /note="Description of Artificial Sequence: Synthetic oligonucleotide"
  source: /note="Description of Combined DNA/RNA Molecule: Synthetic oligonucleotide"
uucuaaaggaagcagaauatt

SEQ ID NO: 267 - DNA, 21 bp, Artificial Sequence
  source: /note="Description of Artificial Sequence: Synthetic oligonucleotide"
  source: /note="Description of Combined DNA/RNA Molecule: Synthetic oligonucleotide"
ucuaaaggaagcagaauagtt

SEQ ID NO: 268 - DNA, 21 bp, Artificial Sequence
  source: /note="Description of Artificial Sequence: Synthetic oligonucleotide"
  source: /note="Description of Combined DNA/RNA Molecule: Synthetic oligonucleotide"
cuaaaggaagcagaauagctt

SEQ ID NO: 269 - DNA, 21 bp, Artificial Sequence
  source: /note="Description of Artificial Sequence: Synthetic oligonucleotide"
  source: /note="Description of Combined DNA/RNA Molecule: Synthetic oligonucleotide"
aaaggaagcagaauagcuctt

SEQ ID NO: 270 - DNA, 21 bp, Artificial Sequence
  source: /note="Description of Artificial Sequence: Synthetic oligonucleotide"
  source: /note="Description of Combined DNA/RNA Molecule: Synthetic oligonucleotide"
auaaguaagaugcauuuactt

SEQ ID NO: 271 - DNA, 21 bp, Artificial Sequence
  source: /note="Description of Artificial Sequence: Synthetic oligonucleotide"
  source: /note="Description of Combined DNA/RNA Molecule: Synthetic oligonucleotide"
uaaguaagaugcauuuacutt

SEQ ID NO: 272 - DNA, 21 bp, Artificial Sequence
  source: /note="Description of Artificial Sequence: Synthetic oligonucleotide"
  source: /note="Description of Combined DNA/RNA Molecule: Synthetic oligonucleotide"
aaguaagaugcauuuacuatt

SEQ ID NO: 273 - DNA, 21 bp, Artificial Sequence
  source: /note="Description of Artificial Sequence: Synthetic oligonucleotide"
  source: /note="Description of Combined DNA/RNA Molecule: Synthetic oligonucleotide"
aguaagaugcauuuacuactt

SEQ ID NO: 274 - DNA, 21 bp, Artificial Sequence
  source: /note="Description of Artificial Sequence: Synthetic oligonucleotide"
  source: /note="Description of Combined DNA/RNA Molecule: Synthetic oligonucleotide"
guaagaugcauuuacuacatt

SEQ ID NO: 275 - DNA, 21 bp, Artificial Sequence
  source: /note="Description of Artificial Sequence: Synthetic oligonucleotide"
  source: /note="Description of Combined DNA/RNA Molecule: Synthetic oligonucleotide"
uaagaugcauuuacuacagtt

SEQ ID NO: 276 - DNA, 21 bp, Artificial Sequence
  source: /note="Description of Artificial Sequence: Synthetic oligonucleotide"
  source: /note="Description of Combined DNA/RNA Molecule: Synthetic oligonucleotide"
uuggcuucuaaugcuucagtt

SEQ ID NO: 277 - DNA, 21 bp, Artificial Sequence
  source: /note="Description of Artificial Sequence: Synthetic oligonucleotide"
  source: /note="Description of Combined DNA/RNA Molecule: Synthetic oligonucleotide"
uggcuucuaaugcuucagatt

SEQ ID NO: 278 - DNA, 21 bp, Artificial Sequence
  source: /note="Description of Artificial Sequence: Synthetic oligonucleotide"
  source: /note="Description of Combined DNA/RNA Molecule: Synthetic oligonucleotide"
ggcuucuaaugcuucagautt

SEQ ID NO: 279 - DNA, 21 bp, Artificial Sequence
  source: /note="Description of Artificial Sequence: Synthetic oligonucleotide"
  source: /note="Description of Combined DNA/RNA Molecule: Synthetic oligonucleotide"
gcuucuaaugcuucagauatt

SEQ ID NO: 280 - DNA, 21 bp, Artificial Sequence
  source: /note="Description of Artificial Sequence: Synthetic oligonucleotide"
  source: /note="Description of Combined DNA/RNA Molecule: Synthetic oligonucleotide"
ucuaaugcuucagauagaatt

SEQ ID NO: 281 - DNA, 21 bp, Artificial Sequence
  source: /note="Description of Artificial Sequence: Synthetic oligonucleotide"
  source: /note="Description of Combined DNA/RNA Molecule: Synthetic oligonucleotide"
cuaaugcuucagauagaautt

SEQ ID NO: 282 - DNA, 21 bp, Artificial Sequence
  source: /note="Description of Artificial Sequence: Synthetic oligonucleotide"
  source: /note="Description of Combined DNA/RNA Molecule: Synthetic oligonucleotide"
uaaugcuucagauagaauatt

SEQ ID NO: 283 - DNA, 21 bp, Artificial Sequence
  source: /note="Description of Artificial Sequence: Synthetic oligonucleotide"
  source: /note="Description of Combined DNA/RNA Molecule: Synthetic oligonucleotide"
aaugcuucagauagaauactt

SEQ ID NO: 284 - DNA, 21 bp, Artificial Sequence
  source: /note="Description of Artificial Sequence: Synthetic oligonucleotide"
  source: /note="Description of Combined DNA/RNA Molecule: Synthetic oligonucleotide"
augcuucagauagaauacatt

SEQ ID NO: 285 - DNA, 21 bp, Artificial Sequence
  source: /note="Description of Artificial Sequence: Synthetic oligonucleotide"
  source: /note="Description of Combined DNA/RNA Molecule: Synthetic oligonucleotide"
ugcuucagauagaauacagtt

SEQ ID NO: 286 - DNA, 21 bp, Artificial Sequence
  source: /note="Description of Artificial Sequence: Synthetic oligonucleotide"
  source: /note="Description of Combined DNA/RNA Molecule: Synthetic oligonucleotide"
gcuucagauagaauacagutt

SEQ ID NO: 287 - DNA, 21 bp, Artificial Sequence
  source: /note="Description of Artificial Sequence: Synthetic oligonucleotide"
  source: /note="Description of Combined DNA/RNA Molecule: Synthetic oligonucleotide"
cuucagauagaauacaguutt

SEQ ID NO: 288 - DNA, 21 bp, Artificial Sequence
  source: /note="Description of Artificial Sequence: Synthetic oligonucleotide"
  source: /note="Description of Combined DNA/RNA Molecule: Synthetic oligonucleotide"
uucagauagaauacaguugtt

SEQ ID NO: 289 - DNA, 21 bp, Artificial Sequence
  source: /note="Description of Artificial Sequence: Synthetic oligonucleotide"
  source: /note="Description of Combined DNA/RNA Molecule: Synthetic oligonucleotide"
ucagauagaauacaguuggtt

SEQ ID NO: 290 - DNA, 21 bp, Artificial Sequence
  source: /note="Description of Artificial Sequence: Synthetic oligonucleotide"
  source: /note="Description of Combined DNA/RNA Molecule: Synthetic oligonucleotide"
cagauagaauacaguugggtt

SEQ ID NO: 291 - DNA, 21 bp, Artificial Sequence
  source: /note="Description of Artificial Sequence: Synthetic oligonucleotide"
  source: /note="Description of Combined DNA/RNA Molecule: Synthetic oligonucleotide"
cauugugaaauaaaauuuutt

SEQ ID NO: 292 - DNA, 21 bp, Artificial Sequence
  source: /note="Description of Artificial Sequence: Synthetic oligonucleotide"
  source: /note="Description of Combined DNA/RNA Molecule: Synthetic oligonucleotide"
auugugaaauaaaauuuuctt

SEQ ID NO: 293 - DNA, 21 bp, Artificial Sequence
  source: /note="Description of Artificial Sequence: Synthetic oligonucleotide"
  source: /note="Description of Combined DNA/RNA Molecule: Synthetic oligonucleotide"
uugugaaauaaaauuuucutt

SEQ ID NO: 294 - DNA, 21 bp, Artificial Sequence
  source: /note="Description of Artificial Sequence: Synthetic oligonucleotide"
  source: /note="Description of Combined DNA/RNA Molecule: Synthetic oligonucleotide"
ugugaaauaaaauuuucuutt

SEQ ID NO: 295 - DNA, 21 bp, Artificial Sequence
  source: /note="Description of Artificial Sequence: Synthetic oligonucleotide"
  source: /note="Description of Combined DNA/RNA Molecule: Synthetic oligonucleotide"
gugaaauaaaauuuucuuatt

SEQ ID NO: 296 - DNA, 21 bp, Artificial Sequence
  source: /note="Description of Artificial Sequence: Synthetic oligonucleotide"
  source: /note="Description of Combined DNA/RNA Molecule: Synthetic oligonucleotide"
ugaaauaaaauuuucuuactt

SEQ ID NO: 297 - DNA, 21 bp, Artificial Sequence
  source: /note="Description of Artificial Sequence: Synthetic oligonucleotide"
  source: /note="Description of Combined DNA/RNA Molecule: Synthetic oligonucleotide"
gaaauaaaauuuucuuacctt

SEQ ID NO: 298 - DNA, 21 bp, Artificial Sequence
  source: /note="Description of Artificial Sequence: Synthetic oligonucleotide"
  source: /note="Description of Combined DNA/RNA Molecule: Synthetic oligonucleotide"
aaauaaaauuuucuuaccctt

SEQ ID NO: 299 - DNA, 21 bp, Artificial Sequence
  source: /note="Description of Artificial Sequence: Synthetic oligonucleotide"
  source: /note="Description of Combined DNA/RNA Molecule: Synthetic oligonucleotide"
aauaaaauuuucuuacccatt

SEQ ID NO: 300 - DNA, 21 bp, Artificial Sequence
  source: /note="Description of Artificial Sequence: Synthetic oligonucleotide"
  source: /note="Description of Combined DNA/RNA Molecule: Synthetic oligonucleotide"
auaaaauuuucuuacccaatt

SEQ ID NO: 301 - DNA, 21 bp, Artificial Sequence
  source: /note="Description of Artificial Sequence: Synthetic oligonucleotide"
  source: /note="Description of Combined DNA/RNA Molecule: Synthetic oligonucleotide"
gcuggauucauugggacugtt

SEQ ID NO: 302 - DNA, 21 bp, Artificial Sequence
  source: /note="Description of Artificial Sequence: Synthetic oligonucleotide"
  source: /note="Description of Combined DNA/RNA Molecule: Synthetic oligonucleotide"
agcuggauucauugggacutt

SEQ ID NO: 303 - DNA, 21 bp, Artificial Sequence
  source: /note="Description of Artificial Sequence: Synthetic oligonucleotide"
  source: /note="Description of Combined DNA/RNA Molecule: Synthetic oligonucleotide"
cagcuggauucauugggactt

SEQ ID NO: 304 - DNA, 21 bp, Artificial Sequence
  source: /note="Description of Artificial Sequence: Synthetic oligonucleotide"
  source: /note="Description of Combined DNA/RNA Molecule: Synthetic oligonucleotide"
uuauggaugacugacauggtt

SEQ ID NO: 305 - DNA, 21 bp, Artificial Sequence
  source: /note="Description of Artificial Sequence: Synthetic oligonucleotide"
  source: /note="Description of Combined DNA/RNA Molecule: Synthetic oligonucleotide"
aguuauggaugacugacautt

SEQ ID NO: 306 - DNA, 21 bp, Artificial Sequence
  source: /note="Description of Artificial Sequence: Synthetic oligonucleotide"
  source: /note="Description of Combined DNA/RNA Molecule: Synthetic oligonucleotide"
ucugguuuggguuuccagctt

SEQ ID NO: 307 - DNA, 21 bp, Artificial Sequence
  source: /note="Description of Artificial Sequence: Synthetic oligonucleotide"
  source: /note="Description of Combined DNA/RNA Molecule: Synthetic oligonucleotide"
aacucucugguuuggguuutt

SEQ ID NO: 308 - DNA, 21 bp, Artificial Sequence
  source: /note="Description of Artificial Sequence: Synthetic oligonucleotide"
  source: /note="Description of Combined DNA/RNA Molecule: Synthetic oligonucleotide"
caacucucugguuuggguutt

SEQ ID NO: 309 - DNA, 21 bp, Artificial Sequence
  source: /note="Description of Artificial Sequence: Synthetic oligonucleotide"
  source: /note="Description of Combined DNA/RNA Molecule: Synthetic oligonucleotide"
cagaacugacuugucucggtt

SEQ ID NO: 310 - DNA, 21 bp, Artificial Sequence
  source: /note="Description of Artificial Sequence: Synthetic oligonucleotide"
  source: /note="Description of Combined DNA/RNA Molecule: Synthetic oligonucleotide"
uccagaacugacuugucuctt

SEQ ID NO: 311 - DNA, 21 bp, Artificial Sequence
  source: /note="Description of Artificial Sequence: Synthetic oligonucleotide"
  source: /note="Description of Combined DNA/RNA Molecule: Synthetic oligonucleotide"
cuccagaacugacuugucutt

SEQ ID NO: 312 - DNA, 21 bp, Artificial Sequence
  source: /note="Description of Artificial Sequence: Synthetic oligonucleotide"
  source: /note="Description of Combined DNA/RNA Molecule: Synthetic oligonucleotide"
uucucuuccuccagaacugtt

SEQ ID NO: 313 - DNA, 21 bp, Artificial Sequence
  source: /note="Description of Artificial Sequence: Synthetic oligonucleotide"
  source: /note="Description of Combined DNA/RNA Molecule: Synthetic oligonucleotide"
cuucucuuccuccagaacutt

SEQ ID NO: 314 - DNA, 21 bp, Artificial Sequence
  source: /note="Description of Artificial Sequence: Synthetic oligonucleotide"
  source: /note="Description of Combined DNA/RNA Molecule: Synthetic oligonucleotide"
cuucuucucuuccuccagatt

SEQ ID NO: 315 - DNA, 21 bp, Artificial Sequence
  source: /note="Description of Artificial Sequence: Synthetic oligonucleotide"
  source: /note="Description of Combined DNA/RNA Molecule: Synthetic oligonucleotide"
agaaacuucucuggagccutt

SEQ ID NO: 316 - DNA, 21 bp, Artificial Sequence
  source: /note="Description of Artificial Sequence: Synthetic oligonucleotide"
  source: /note="Description of Combined DNA/RNA Molecule: Synthetic oligonucleotide"
uagaaacuucucuggagcctt

SEQ ID NO: 317 - DNA, 21 bp, Artificial Sequence
  source: /note="Description of Artificial Sequence: Synthetic oligonucleotide"
  source: /note="Description of Combined DNA/RNA Molecule: Synthetic oligonucleotide"
guagaaacuucucuggagctt

SEQ ID NO: 318 - DNA, 21 bp, Artificial Sequence
  source: /note="Description of Artificial Sequence: Synthetic oligonucleotide"
  source: /note="Description of Combined DNA/RNA Molecule: Synthetic oligonucleotide"
cguagaaacuucucuggagtt

SEQ ID NO: 319 - DNA, 21 bp, Artificial Sequence
  source: /note="Description of Artificial Sequence: Synthetic oligonucleotide"
  source: /note="Description of Combined DNA/RNA Molecule: Synthetic oligonucleotide"
ucaguuagcucggacuucatt

SEQ ID NO: 320 - DNA, 21 bp, Artificial Sequence
  source: /note="Description of Artificial Sequence: Synthetic oligonucleotide"
  source: /note="Description of Combined DNA/RNA Molecule: Synthetic oligonucleotide"
aacuucaguuagcucggactt

SEQ ID NO: 321 - DNA, 21 bp, Artificial Sequence
  source: /note="Description of Artificial Sequence: Synthetic oligonucleotide"
  source: /note="Description of Combined DNA/RNA Molecule: Synthetic oligonucleotide"
gaacuucaguuagcucggatt

SEQ ID NO: 322 - DNA, 21 bp, Artificial Sequence
  source: /note="Description of Artificial Sequence: Synthetic oligonucleotide"
  source: /note="Description of Combined DNA/RNA Molecule: Synthetic oligonucleotide"
ggaacuucaguuagcucggtt

SEQ ID NO: 323 - DNA, 21 bp, Artificial Sequence
  source: /note="Description of Artificial Sequence: Synthetic oligonucleotide"
  source: /note="Description of Combined DNA/RNA Molecule: Synthetic oligonucleotide"
aggaacuucaguuagcucgtt

SEQ ID NO: 324 - DNA, 21 bp, Artificial Sequence
  source: /note="Description of Artificial Sequence: Synthetic oligonucleotide"
  source: /note="Description of Combined DNA/RNA Molecule: Synthetic oligonucleotide"
caggaacuucaguuagcuctt

SEQ ID NO: 325 - DNA, 21 bp, Artificial Sequence
  source: /note="Description of Artificial Sequence: Synthetic oligonucleotide"
  source: /note="Description of Combined DNA/RNA Molecule: Synthetic oligonucleotide"
gcaggaacuucaguuagcutt

SEQ ID NO: 326 - DNA, 21 bp, Artificial Sequence
  source: /note="Description of Artificial Sequence: Synthetic oligonucleotide"
  source: /note="Description of Combined DNA/RNA Molecule: Synthetic oligonucleotide"
agcaggaacuucaguuagctt

SEQ ID NO: 327 - DNA, 21 bp, Artificial Sequence
  source: /note="Description of Artificial Sequence: Synthetic oligonucleotide"
  source: /note="Description of Combined DNA/RNA Molecule: Synthetic oligonucleotide"
aaauucgggaagcaggaactt

SEQ ID NO: 328 - DNA, 21 bp, Artificial Sequence
  source: /note="Description of Artificial Sequence: Synthetic oligonucleotide"
  source: /note="Description of Combined DNA/RNA Molecule: Synthetic oligonucleotide"
aaaauucgggaagcaggaatt

SEQ ID NO: 329 - DNA, 21 bp, Artificial Sequence
  source: /note="Description of Artificial Sequence: Synthetic oligonucleotide"
  source: /note="Description of Combined DNA/RNA Molecule: Synthetic oligonucleotide"
caaaauucgggaagcaggatt

SEQ ID NO: 330 - DNA, 21 bp, Artificial Sequence
  source: /note="Description of Artificial Sequence: Synthetic oligonucleotide"
  source: /note="Description of Combined DNA/RNA Molecule: Synthetic oligonucleotide"
ucaaaauucgggaagcaggtt

SEQ ID NO: 331 - DNA, 21 bp, Artificial Sequence
  source: /note="Description of Artificial Sequence: Synthetic oligonucleotide"
  source: /note="Description of Combined DNA/RNA Molecule: Synthetic oligonucleotide"
uucaaaauucgggaagcagtt

SEQ ID NO: 332 - DNA, 21 bp, Artificial Sequence
  source: /note="Description of Artificial Sequence: Synthetic oligonucleotide"
  source: /note="Description of Combined DNA/RNA Molecule: Synthetic oligonucleotide"
cuucaaaauucgggaagcatt

SEQ ID NO: 333 - DNA, 21 bp, Artificial Sequence
  source: /note="Description of Artificial Sequence: Synthetic oligonucleotide"
  source: /note="Description of Combined DNA/RNA Molecule: Synthetic oligonucleotide"
ccuucaaaauucgggaagctt

SEQ ID NO: 334 - DNA, 21 bp, Artificial Sequence
  source: /note="Description of Artificial Sequence: Synthetic oligonucleotide"
  source: /note="Description of Combined DNA/RNA Molecule: Synthetic oligonucleotide"
uccuucaaaauucgggaagtt

SEQ ID NO: 335 - DNA, 21 bp, Artificial Sequence
  source: /note="Description of Artificial Sequence: Synthetic oligonucleotide"
  source: /note="Description of Combined DNA/RNA Molecule: Synthetic oligonucleotide"
cuccuucaaaauucgggaatt

SEQ ID NO: 336 - DNA, 21 bp, Artificial Sequence
  source: /note="Description of Artificial Sequence: Synthetic oligonucleotide"
  source: /note="Description of Combined DNA/RNA Molecule: Synthetic oligonucleotide"
ucuccuucaaaauucgggatt

SEQ ID NO: 337 - DNA, 21 bp, Artificial Sequence
  source: /note="Description of Artificial Sequence: Synthetic oligonucleotide"
  source: /note="Description of Combined DNA/RNA Molecule: Synthetic oligonucleotide"
cucuccuucaaaauucgggtt

SEQ ID NO: 338 - DNA, 21 bp, Artificial Sequence
  source: /note="Description of Artificial Sequence: Synthetic oligonucleotide"
  source: /note="Description of Combined DNA/RNA Molecule: Synthetic oligonucleotide"
aacuaguucuccacauccgtt

SEQ ID NO: 339 - DNA, 21 bp, Artificial Sequence
  source: /note="Description of Artificial Sequence: Synthetic oligonucleotide"
  source: /note="Description of Combined DNA/RNA Molecule: Synthetic oligonucleotide"
aaacuaguucuccacaucctt

SEQ ID NO: 340 - DNA, 21 bp, Artificial Sequence
  source: /note="Description of Artificial Sequence: Synthetic oligonucleotide"
  source: /note="Description of Combined DNA/RNA Molecule: Synthetic oligonucleotide"
caaacuaguucuccacauctt

SEQ ID NO: 341 - DNA, 21 bp, Artificial Sequence
  source: /note="Description of Artificial Sequence: Synthetic oligonucleotide"
  source: /note="Description of Combined DNA/RNA Molecule: Synthetic oligonucleotide"
ccaaacuaguucuccacautt

SEQ ID NO: 342 - DNA, 21 bp, Artificial Sequence
  source: /note="Description of Artificial Sequence: Synthetic oligonucleotide"
  source: /note="Description of Combined DNA/RNA Molecule: Synthetic oligonucleotide"
cccaaacuaguucuccacatt

SEQ ID NO: 343 - DNA, 21 bp, Artificial Sequence
  source: /note="Description of Artificial Sequence: Synthetic oligonucleotide"
  source: /note="Description of Combined DNA/RNA Molecule: Synthetic oligonucleotide"
acccaaacuaguucuccactt

SEQ ID NO: 344 - DNA, 21 bp, Artificial Sequence
  source: /note="Description of Artificial Sequence: Synthetic oligonucleotide"
  source: /note="Description of Combined DNA/RNA Molecule: Synthetic oligonucleotide"
uacccaaacuaguucuccatt

SEQ ID NO: 345 - DNA, 21 bp, Artificial Sequence
  source: /note="Description of Artificial Sequence: Synthetic oligonucleotide"
  source: /note="Description of Combined DNA/RNA Molecule: Synthetic oligonucleotide"
cuacccaaacuaguucucctt

SEQ ID NO: 346 - DNA, 21 bp, Artificial Sequence
  source: /note="Description of Artificial Sequence: Synthetic oligonucleotide"
  source: /note="Description of Combined DNA/RNA Molecule: Synthetic oligonucleotide"
ccuacccaaacuaguucuctt

SEQ ID NO: 347 - DNA, 21 bp, Artificial Sequence
  source: /note="Description of Artificial Sequence: Synthetic oligonucleotide"
  source: /note="Description of Combined DNA/RNA Molecule: Synthetic oligonucleotide"
uuucugcuguucucagcgutt

SEQ ID NO: 348 - DNA, 21 bp, Artificial Sequence
  source: /note="Description of Artificial Sequence: Synthetic oligonucleotide"
  source: /note="Description of Combined DNA/RNA Molecule: Synthetic oligonucleotide"
uguuucugcuguucucagctt

SEQ ID NO: 349 - DNA, 21 bp, Artificial Sequence
  source: /note="Description of Artificial Sequence: Synthetic oligonucleotide"
  source: /note="Description of Combined DNA/RNA Molecule: Synthetic oligonucleotide"
uuguuucugcuguucucagtt

SEQ ID NO: 350 - DNA, 21 bp, Artificial Sequence
  source: /note="Description of Artificial Sequence: Synthetic oligonucleotide"
  source: /note="Description of Combined DNA/RNA Molecule: Synthetic oligonucleotide"
auuguuucugcuguucucatt

SEQ ID NO: 351 - DNA, 21 bp, Artificial Sequence
  source: /note="Description of Artificial Sequence: Synthetic oligonucleotide"
  source: /note="Description of Combined DNA/RNA Molecule: Synthetic oligonucleotide"
aauuguuucugcuguucuctt

SEQ ID NO: 352 - DNA, 21 bp, Artificial Sequence
  source: /note="Description of Artificial Sequence: Synthetic oligonucleotide"
  source: /note="Description of Combined DNA/RNA Molecule: Synthetic oligonucleotide"
uaauuguuucugcuguucutt

SEQ ID NO: 353 - DNA, 21 bp, Artificial Sequence
  source: /note="Description of Artificial Sequence: Synthetic oligonucleotide"
  source: /note="Description of Combined DNA/RNA Molecule: Synthetic oligonucleotide"
guaauuguuucugcuguuctt

SEQ ID NO: 354 - DNA, 21 bp, Artificial Sequence
  source: /note="Description of Artificial Sequence: Synthetic oligonucleotide"
  source: /note="Description of Combined DNA/RNA Molecule: Synthetic oligonucleotide"
aguaauuguuucugcuguutt

SEQ ID NO: 355 - DNA, 21 bp, Artificial Sequence
  source: /note="Description of Artificial Sequence: Synthetic oligonucleotide"
  source: /note="Description of Combined DNA/RNA Molecule: Synthetic oligonucleotide"
caguaauuguuucugcugutt

SEQ ID NO: 356 - DNA, 21 bp, Artificial Sequence
  source: /note="Description of Artificial Sequence: Synthetic oligonucleotide"
  source: /note="Description of Combined DNA/RNA Molecule: Synthetic oligonucleotide"
ccaguaauuguuucugcugtt

SEQ ID NO: 357 - DNA, 21 bp, Artificial Sequence
  source: /note="Description of Artificial Sequence: Synthetic oligonucleotide"
  source: /note="Description of Combined DNA/RNA Molecule: Synthetic oligonucleotide"
gccaguaauuguuucugcutt

SEQ ID NO: 358 - DNA, 21 bp, Artificial Sequence
  source: /note="Description of Artificial Sequence: Synthetic oligonucleotide"
  source: /note="Description of Combined DNA/RNA Molecule: Synthetic oligonucleotide"
ugccaguaauuguuucugctt

SEQ ID NO: 359 - DNA, 21 bp, Artificial Sequence
  source: /note="Description of Artificial Sequence: Synthetic oligonucleotide"
  source: /note="Description of Combined DNA/RNA Molecule: Synthetic oligonucleotide"
uugccaguaauuguuucugtt

SEQ ID NO: 360 - DNA, 21 bp, Artificial Sequence
  source: /note="Description of Artificial Sequence: Synthetic oligonucleotide"
  source: /note="Description of Combined DNA/RNA Molecule: Synthetic oligonucleotide"
cuugccaguaauuguuucutt

SEQ ID NO: 361 - DNA, 21 bp, Artificial Sequence
  source: /note="Description of Artificial Sequence: Synthetic oligonucleotide"
  source: /note="Description of Combined DNA/RNA Molecule: Synthetic oligonucleotide"
acuugccaguaauuguuuctt

SEQ ID NO: 362 - DNA, 21 bp, Artificial Sequence
  source: /note="Description of Artificial Sequence: Synthetic oligonucleotide"
  source: /note="Description of Combined DNA/RNA Molecule: Synthetic oligonucleotide"
auacuugccaguaauuguutt

SEQ ID NO: 363 - DNA, 21 bp, Artificial Sequence
  source: /note="Description of Artificial Sequence: Synthetic oligonucleotide"
  source: /note="Description of Combined DNA/RNA Molecule: Synthetic oligonucleotide"
cauacuugccaguaauugutt

SEQ ID NO: 364 - DNA, 21 bp, Artificial Sequence
  source: /note="Description of Artificial Sequence: Synthetic oligonucleotide"
  source: /note="Description of Combined DNA/RNA Molecule: Synthetic oligonucleotide"
ccauacuugccaguaauugtt

SEQ ID NO: 365 - DNA, 21 bp, Artificial Sequence
  source: /note="Description of Artificial Sequence: Synthetic oligonucleotide"
  source: /note="Description of Combined DNA/RNA Molecule: Synthetic oligonucleotide"
accauacuugccaguaauutt

SEQ ID NO: 366 - DNA, 21 bp, Artificial Sequence
  source: /note="Description of Artificial Sequence: Synthetic oligonucleotide"
  source: /note="Description of Combined DNA/RNA Molecule: Synthetic oligonucleotide"
cacaccauacuugccaguatt

SEQ ID NO: 367 - DNA, 21 bp, Artificial Sequence
  source: /note="Description of Artificial Sequence: Synthetic oligonucleotide"
  source: /note="Description of Combined DNA/RNA Molecule: Synthetic oligonucleotide"
ucaaaaaccuggcggacautt

SEQ ID NO: 368 - DNA, 21 bp, Artificial Sequence
  source: /note="Description of Artificial Sequence: Synthetic oligonucleotide"
  source: /note="Description of Combined DNA/RNA Molecule: Synthetic oligonucleotide"
cucaaaaaccuggcggacatt

SEQ ID NO: 369 - DNA, 21 bp, Artificial Sequence
  source: /note="Description of Artificial Sequence: Synthetic oligonucleotide"
  source: /note="Description of Combined DNA/RNA Molecule: Synthetic oligonucleotide"
acucaaaaaccuggcggactt

SEQ ID NO: 370 - DNA, 21 bp, Artificial Sequence
  source: /note="Description of Artificial Sequence: Synthetic oligonucleotide"
  source: /note="Description of Combined DNA/RNA Molecule: Synthetic oligonucleotide"
uacucaaaaaccuggcggatt

SEQ ID NO: 371 - DNA, 21 bp, Artificial Sequence
  source: /note="Description of Artificial Sequence: Synthetic oligonucleotide"
  source: /note="Description of Combined DNA/RNA Molecule: Synthetic oligonucleotide"
auacucaaaaaccuggcggtt

SEQ ID NO: 372 - DNA, 21 bp, Artificial Sequence
  source: /note="Description of Artificial Sequence: Synthetic oligonucleotide"
  source: /note="Description of Combined DNA/RNA Molecule: Synthetic oligonucleotide"
cauacucaaaaaccuggcgtt

SEQ ID NO: 373 - DNA, 21 bp, Artificial Sequence
  source: /note="Description of Artificial Sequence: Synthetic oligonucleotide"
  source: /note="Description of Combined DNA/RNA Molecule: Synthetic oligonucleotide"
ucauacucaaaaaccuggctt

SEQ ID NO: 374 - DNA, 21 bp, Artificial Sequence
  source: /note="Description of Artificial Sequence: Synthetic oligonucleotide"
  source: /note="Description of Combined DNA/RNA Molecule: Synthetic oligonucleotide"
gucauacucaaaaaccuggtt

SEQ ID NO: 375 - DNA, 21 bp, Artificial Sequence
  source: /note="Description of Artificial Sequence: Synthetic oligonucleotide"
  source: /note="Description of Combined DNA/RNA Molecule: Synthetic oligonucleotide"
ggucauacucaaaaaccugtt

SEQ ID NO: 376 - DNA, 21 bp, Artificial Sequence
  source: /note="Description of Artificial Sequence: Synthetic oligonucleotide"
  source: /note="Description of Combined DNA/RNA Molecule: Synthetic oligonucleotide"
aggucauacucaaaaaccutt

SEQ ID NO: 377 - DNA, 21 bp, Artificial Sequence
  source: /note="Description of Artificial Sequence: Synthetic oligonucleotide"
  source: /note="Description of Combined DNA/RNA Molecule: Synthetic oligonucleotide"
gaggucauacucaaaaacctt

SEQ ID NO: 378 - DNA, 21 bp, Artificial Sequence
  source: /note="Description of Artificial Sequence: Synthetic oligonucleotide"
  source: /note="Description of Combined DNA/RNA Molecule: Synthetic oligonucleotide"
ugaggucauacucaaaaactt

SEQ ID NO: 379 - DNA, 21 bp, Artificial Sequence
  source: /note="Description of Artificial Sequence: Synthetic oligonucleotide"
  source: /note="Description of Combined DNA/RNA Molecule: Synthetic oligonucleotide"
uaaacuggcugaugagguctt

SEQ ID NO: 380 - DNA, 21 bp, Artificial Sequence
  source: /note="Description of Artificial Sequence: Synthetic oligonucleotide"
  source: /note="Description of Combined DNA/RNA Molecule: Synthetic oligonucleotide"
auaaacuggcugaugaggutt

SEQ ID NO: 381 - DNA, 21 bp, Artificial Sequence
  source: /note="Description of Artificial Sequence: Synthetic oligonucleotide"
  source: /note="Description of Combined DNA/RNA Molecule: Synthetic oligonucleotide"
cauaaacuggcugaugaggtt

SEQ ID NO: 382 - DNA, 21 bp, Artificial Sequence
  source: /note="Description of Artificial Sequence: Synthetic oligonucleotide"
  source: /note="Description of Combined DNA/RNA Molecule: Synthetic oligonucleotide"
gcauaaacuggcugaugagtt

SEQ ID NO: 383 - DNA, 21 bp, Artificial Sequence
  source: /note="Description of Artificial Sequence: Synthetic oligonucleotide"
  source: /note="Description of Combined DNA/RNA Molecule: Synthetic oligonucleotide"
ugcauaaacuggcugaugatt

SEQ ID NO: 384 - DNA, 21 bp, Artificial Sequence
  source: /note="Description of Artificial Sequence: Synthetic oligonucleotide"
  source: /note="Description of Combined DNA/RNA Molecule: Synthetic oligonucleotide"
cccugcauaaacuggcugatt

SEQ ID NO: 385 - DNA, 21 bp, Artificial Sequence
  source: /note="Description of Artificial Sequence: Synthetic oligonucleotide"
  source: /note="Description of Combined DNA/RNA Molecule: Synthetic oligonucleotide"
gaaccuuagaaggguagcctt

SEQ ID NO: 386 - DNA, 21 bp, Artificial Sequence
  source: /note="Description of Artificial Sequence: Synthetic oligonucleotide"
  source: /note="Description of Combined DNA/RNA Molecule: Synthetic oligonucleotide"
ugaaccuuagaaggguagctt

SEQ ID NO: 387 - DNA, 21 bp, Artificial Sequence
  source: /note="Description of Artificial Sequence: Synthetic oligonucleotide"
  source: /note="Description of Combined DNA/RNA Molecule: Synthetic oligonucleotide"
gugaaccuuagaaggguagtt

SEQ ID NO: 388 - DNA, 21 bp, Artificial Sequence
  source: /note="Description of Artificial Sequence: Synthetic oligonucleotide"
  source: /note="Description of Combined DNA/RNA Molecule: Synthetic oligonucleotide"
ugugaaccuuagaaggguatt

SEQ ID NO: 389 - DNA, 21 bp, Artificial Sequence
  source: /note="Description of Artificial Sequence: Synthetic oligonucleotide"
  source: /note="Description of Combined DNA/RNA Molecule: Synthetic oligonucleotide"
augugaaccuuagaagggutt

SEQ ID NO: 390 - DNA, 21 bp, Artificial Sequence
  source: /note="Description of Artificial Sequence: Synthetic oligonucleotide"
  source: /note="Description of Combined DNA/RNA Molecule: Synthetic oligonucleotide"
uaugugaaccuuagaagggtt

SEQ ID NO: 391 - DNA, 21 bp, Artificial Sequence
  source: /note="Description of Artificial Sequence: Synthetic oligonucleotide"
  source: /note="Description of Combined DNA/RNA Molecule: Synthetic oligonucleotide"
guaugugaaccuuagaaggtt

SEQ ID NO: 392 - DNA, 21 bp, Artificial Sequence
  source: /note="Description of Artificial Sequence: Synthetic oligonucleotide"
  source: /note="Description of Combined DNA/RNA Molecule: Synthetic oligonucleotide"
aguaugugaaccuuagaagtt

SEQ ID NO: 393 - DNA, 21 bp, Artificial Sequence
  source: /note="Description of Artificial Sequence: Synthetic oligonucleotide"
  source: /note="Description of Combined DNA/RNA Molecule: Synthetic oligonucleotide"
caguaugugaaccuuagaatt

SEQ ID NO: 394 - DNA, 21 bp, Artificial Sequence
  source: /note="Description of Artificial Sequence: Synthetic oligonucleotide"
  source: /note="Description of Combined DNA/RNA Molecule: Synthetic oligonucleotide"
ggcaguaugugaaccuuagtt

SEQ ID NO: 395 - DNA, 21 bp, Artificial Sequence
  source: /note="Description of Artificial Sequence: Synthetic oligonucleotide"
  source: /note="Description of Combined DNA/RNA Molecule: Synthetic oligonucleotide"
aggcaguaugugaaccuuatt

SEQ ID NO: 396 - DNA, 21 bp, Artificial Sequence
  source: /note="Description of Artificial Sequence: Synthetic oligonucleotide"
  source: /note="Description of Combined DNA/RNA Molecule: Synthetic oligonucleotide"
uuaugacaguucuggacuctt

SEQ ID NO: 397 - DNA, 21 bp, Artificial Sequence
  source: /note="Description of Artificial Sequence: Synthetic oligonucleotide"
  source: /note="Description of Combined DNA/RNA Molecule: Synthetic oligonucleotide"
cuuaugacaguucuggacutt

SEQ ID NO: 398 - DNA, 21 bp, Artificial Sequence
  source: /note="Description of Artificial Sequence: Synthetic oligonucleotide"
  source: /note="Description of Combined DNA/RNA Molecule: Synthetic oligonucleotide"
ucuuaugacaguucuggactt

SEQ ID NO: 399 - DNA, 21 bp, Artificial Sequence
  source: /note="Description of Artificial Sequence: Synthetic oligonucleotide"
  source: /note="Description of Combined DNA/RNA Molecule: Synthetic oligonucleotide"
aucuuaugacaguucuggatt

SEQ ID NO: 400 - DNA, 21 bp, Artificial Sequence
  source: /note="Description of Artificial Sequence: Synthetic oligonucleotide"
  source: /note="Description of Combined DNA/RNA Molecule: Synthetic oligonucleotide"
uaucuuaugacaguucuggtt

SEQ ID NO: 401 - DNA, 21 bp, Artificial Sequence
  source: /note="Description of Artificial Sequence: Synthetic oligonucleotide"
  source: /note="Description of Combined DNA/RNA Molecule: Synthetic oligonucleotide"
auaucuuaugacaguucugtt

SEQ ID NO: 402 - DNA, 21 bp, Artificial Sequence
  source: /note="Description of Artificial Sequence: Synthetic oligonucleotide"
  source: /note="Description of Combined DNA/RNA Molecule: Synthetic oligonucleotide"
cauaucuuaugacaguucutt

SEQ ID NO: 403 - DNA, 21 bp, Artificial Sequence
  source: /note="Description of Artificial Sequence: Synthetic oligonucleotide"
  source: /note="Description of Combined DNA/RNA Molecule: Synthetic oligonucleotide"
ucauaucuuaugacaguuctt

SEQ ID NO: 404 - DNA, 21 bp, Artificial Sequence
  source: /note="Description of Artificial Sequence: Synthetic oligonucleotide"
  source: /note="Description of Combined DNA/RNA Molecule: Synthetic oligonucleotide"
cucauaucuuaugacaguutt

SEQ ID NO: 405 - DNA, 21 bp, Artificial Sequence
  source: /note="Description of Artificial Sequence: Synthetic oligonucleotide"
  source: /note="Description of Combined DNA/RNA Molecule: Synthetic oligonucleotide"
gcucauaucuuaugacagutt

SEQ ID NO: 406 - DNA, 21 bp, Artificial Sequence
  source: /note="Description of Artificial Sequence: Synthetic oligonucleotide"
  source: /note="Description of Combined DNA/RNA Molecule: Synthetic oligonucleotide"
agcucauaucuuaugacagtt

SEQ ID NO: 407 - DNA, 21 bp, Artificial Sequence
  source: /note="Description of Artificial Sequence: Synthetic oligonucleotide"
  source: /note="Description of Combined DNA/RNA Molecule: Synthetic oligonucleotide"
cagcucauaucuuaugacatt

SEQ ID NO: 408 - DNA, 21 bp, Artificial Sequence
  source: /note="Description of Artificial Sequence: Synthetic oligonucleotide"
  source: /note="Description of Combined DNA/RNA Molecule: Synthetic oligonucleotide"
ucagcucauaucuuaugactt

SEQ ID NO: 409 - DNA, 21 bp, Artificial Sequence
  source: /note="Description of Artificial Sequence: Synthetic oligonucleotide"
  source: /note="Description of Combined DNA/RNA Molecule: Synthetic oligonucleotide"
gguauucagcucauaucuutt

SEQ ID NO: 410 - DNA, 21 bp, Artificial Sequence
  source: /note="Description of Artificial Sequence: Synthetic oligonucleotide"
  source: /note="Description of Combined DNA/RNA Molecule: Synthetic oligonucleotide"
uucacugucucgguauucatt

SEQ ID NO: 411 - DNA, 21 bp, Artificial Sequence
  source: /note="Description of Artificial Sequence: Synthetic oligonucleotide"
  source: /note="Description of Combined DNA/RNA Molecule: Synthetic oligonucleotide"
auuuccuucucagccuucatt

SEQ ID NO: 412 - DNA, 21 bp, Artificial Sequence
  source: /note="Description of Artificial Sequence: Synthetic oligonucleotide"
  source: /note="Description of Combined DNA/RNA Molecule: Synthetic oligonucleotide"
agggauuuccuucucagcctt

SEQ ID NO: 413 - DNA, 21 bp, Artificial Sequence
  source: /note="Description of Artificial Sequence: Synthetic oligonucleotide"
  source: /note="Description of Combined DNA/RNA Molecule: Synthetic oligonucleotide"
agaauacgggaacuguccgtt

SEQ ID NO: 414 - DNA, 21 bp, Artificial Sequence
  source: /note="Description of Artificial Sequence: Synthetic oligonucleotide"
  source: /note="Description of Combined DNA/RNA Molecule: Synthetic oligonucleotide"
aagaauacgggaacugucctt

SEQ ID NO: 415 - DNA, 21 bp, Artificial Sequence
  source: /note="Description of Artificial Sequence: Synthetic oligonucleotide"
  source: /note="Description of Combined DNA/RNA Molecule: Synthetic oligonucleotide"
caagaauacgggaacuguctt

SEQ ID NO: 416 - DNA, 21 bp, Artificial Sequence
  source: /note="Description of Artificial Sequence: Synthetic oligonucleotide"
  source: /note="Description of Combined DNA/RNA Molecule: Synthetic oligonucleotide"
ccaagaauacgggaacugutt

SEQ ID NO: 417 - DNA, 21 bp, Artificial Sequence
  source: /note="Description of Artificial Sequence: Synthetic oligonucleotide"
  source: /note="Description of Combined DNA/RNA Molecule: Synthetic oligonucleotide"
cuguaaaugacccagaggctt

SEQ ID NO: 418 - DNA, 21 bp, Artificial Sequence
  source: /note="Description of Artificial Sequence: Synthetic oligonucleotide"
  source: /note="Description of Combined DNA/RNA Molecule: Synthetic oligonucleotide"
aguuuggagaggacaauggtt

SEQ ID NO: 419 - DNA, 21 bp, Artificial Sequence
  source: /note="Description of Artificial Sequence: Synthetic oligonucleotide"
  source: /note="Description of Combined DNA/RNA Molecule: Synthetic oligonucleotide"
caguuuggagaggacaaugtt

SEQ ID NO: 420 - DNA, 21 bp, Artificial Sequence
  source: /note="Description of Artificial Sequence: Synthetic oligonucleotide"
  source: /note="Description of Combined DNA/RNA Molecule: Synthetic oligonucleotide"
ucaguuuggagaggacaautt

SEQ ID NO: 421 - DNA, 21 bp, Artificial Sequence
  source: /note="Description of Artificial Sequence: Synthetic oligonucleotide"
  source: /note="Description of Combined DNA/RNA Molecule: Synthetic oligonucleotide"
uucaguuuggagaggacaatt

SEQ ID NO: 422 - DNA, 21 bp, Artificial Sequence
  source: /note="Description of Artificial Sequence: Synthetic oligonucleotide"
  source: /note="Description of Combined DNA/RNA Molecule: Synthetic oligonucleotide"
ucuggguucaguuuggagatt

SEQ ID NO: 423 - DNA, 21 bp, Artificial Sequence
  source: /note="Description of Artificial Sequence: Synthetic oligonucleotide"
  source: /note="Description of Combined DNA/RNA Molecule: Synthetic oligonucleotide"
auucucuggguucaguuugtt

SEQ ID NO: 424 - DNA, 21 bp, Artificial Sequence
  source: /note="Description of Artificial Sequence: Synthetic oligonucleotide"
  source: /note="Description of Combined DNA/RNA Molecule: Synthetic oligonucleotide"
gauucucuggguucaguuutt

SEQ ID NO: 425 - DNA, 21 bp, Artificial Sequence
  source: /note="Description of Artificial Sequence: Synthetic oligonucleotide"
  source: /note="Description of Combined DNA/RNA Molecule: Synthetic oligonucleotide"
gaguuccagauucucugggtt

SEQ ID NO: 426 - DNA, 21 bp, Artificial Sequence
  source: /note="Description of Artificial Sequence: Synthetic oligonucleotide"
  source: /note="Description of Combined DNA/RNA Molecule: Synthetic oligonucleotide"
ugaugaaggcauuggcgactt

SEQ ID NO: 427 - DNA, 21 bp, Artificial Sequence
  source: /note="Description of Artificial Sequence: Synthetic oligonucleotide"
  source: /note="Description of Combined DNA/RNA Molecule: Synthetic oligonucleotide"
cagaugaugaaggcauuggtt

SEQ ID NO: 428 - DNA, 21 bp, Artificial Sequence
  source: /note="Description of Artificial Sequence: Synthetic oligonucleotide"
  source: /note="Description of Combined DNA/RNA Molecule: Synthetic oligonucleotide"
cacagaugaugaaggcauutt

SEQ ID NO: 429 - DNA, 21 bp, Artificial Sequence
  source: /note="Description of Artificial Sequence: Synthetic oligonucleotide"
  source: /note="Description of Combined DNA/RNA Molecule: Synthetic oligonucleotide"
ccacagaugaugaaggcautt

SEQ ID NO: 430 - DNA, 21 bp, Artificial Sequence
  source: /note="Description of Artificial Sequence: Synthetic oligonucleotide"
  source: /note="Description of Combined DNA/RNA Molecule: Synthetic oligonucleotide"
acgguguacaaggugccactt

SEQ ID NO: 431 - DNA, 21 bp, Artificial Sequence
  source: /note="Description of Artificial Sequence: Synthetic oligonucleotide"
  source: /note="Description of Combined DNA/RNA Molecule: Synthetic oligonucleotide"
cauaagcaaaguugacggutt

SEQ ID NO: 432 - DNA, 21 bp, Artificial Sequence
  source: /note="Description of Artificial Sequence: Synthetic oligonucleotide"
  source: /note="Description of Combined DNA/RNA Molecule: Synthetic oligonucleotide"
ucauaagcaaaguugacggtt

SEQ ID NO: 433 - DNA, 21 bp, Artificial Sequence
  source: /note="Description of Artificial Sequence: Synthetic oligonucleotide"
  source: /note="Description of Combined DNA/RNA Molecule: Synthetic oligonucleotide"
gucauaagcaaaguugacgtt

SEQ ID NO: 434 - DNA, 21 bp, Artificial Sequence
  source: /note="Description of Artificial Sequence: Synthetic oligonucleotide"
  source: /note="Description of Combined DNA/RNA Molecule: Synthetic oligonucleotide"
ugucauaagcaaaguugactt

SEQ ID NO: 435 - DNA, 21 bp, Artificial Sequence
  source: /note="Description of Artificial Sequence: Synthetic oligonucleotide"
  source: /note="Description of Combined DNA/RNA Molecule: Synthetic oligonucleotide"
gugucauaagcaaaguugatt

SEQ ID NO: 436 - DNA, 21 bp, Artificial Sequence
  source: /note="Description of Artificial Sequence: Synthetic oligonucleotide"
  source: /note="Description of Combined DNA/RNA Molecule: Synthetic oligonucleotide"
uugaaugggauggucagggtt

SEQ ID NO: 437 - DNA, 21 bp, Artificial Sequence
  source: /note="Description of Artificial Sequence: Synthetic oligonucleotide"
  source: /note="Description of Combined DNA/RNA Molecule: Synthetic oligonucleotide"
cuugaaugggauggucaggtt

SEQ ID NO: 438 - DNA, 21 bp, Artificial Sequence
  source: /note="Description of Artificial Sequence: Synthetic oligonucleotide"
  source: /note="Description of Combined DNA/RNA Molecule: Synthetic oligonucleotide"
ucuugaaugggauggucagtt

SEQ ID NO: 439 - DNA, 21 bp, Artificial Sequence
  source: /note="Description of Artificial Sequence: Synthetic oligonucleotide"
  source: /note="Description of Combined DNA/RNA Molecule: Synthetic oligonucleotide"
cgguucuugaaugggauggtt

SEQ ID NO: 440 - DNA, 21 bp, Artificial Sequence
  source: /note="Description of Artificial Sequence: Synthetic oligonucleotide"
  source: /note="Description of Combined DNA/RNA Molecule: Synthetic oligonucleotide"
agcgguucuugaaugggautt

SEQ ID NO: 441 - DNA, 21 bp, Artificial Sequence
  source: /note="Description of Artificial Sequence: Synthetic oligonucleotide"
  source: /note="Description of Combined DNA/RNA Molecule: Synthetic oligonucleotide"
uagcgguucuugaaugggatt

SEQ ID NO: 442 - DNA, 21 bp, Artificial Sequence
  source: /note="Description of Artificial Sequence: Synthetic oligonucleotide"
  source: /note="Description of Combined DNA/RNA Molecule: Synthetic oligonucleotide"
auagcgguucuugaaugggtt

SEQ ID NO: 443 - DNA, 21 bp, Artificial Sequence
  source: /note="Description of Artificial Sequence: Synthetic oligonucleotide"
  source: /note="Description of Combined DNA/RNA Molecule: Synthetic oligonucleotide"
caaucaugcugcuguacuutt

SEQ ID NO: 444 - DNA, 21 bp, Artificial Sequence
  source: /note="Description of Artificial Sequence: Synthetic oligonucleotide"
  source: /note="Description of Combined DNA/RNA Molecule: Synthetic oligonucleotide"
ucaaucaugcugcuguacutt

SEQ ID NO: 445 - DNA, 21 bp, Artificial Sequence
  source: /note="Description of Artificial Sequence: Synthetic oligonucleotide"
  source: /note="Description of Combined DNA/RNA Molecule: Synthetic oligonucleotide"
uagucaaucaugcugcugutt

SEQ ID NO: 446 - DNA, 21 bp, Artificial Sequence
  source: /note="Description of Artificial Sequence: Synthetic oligonucleotide"
  source: /note="Description of Combined DNA/RNA Molecule: Synthetic oligonucleotide"
guagucaaucaugcugcugtt

SEQ ID NO: 447 - DNA, 21 bp, Artificial Sequence
  source: /note="Description of Artificial Sequence: Synthetic oligonucleotide"
  source: /note="Description of Combined DNA/RNA Molecule: Synthetic oligonucleotide"
uguagucaaucaugcugcutt

SEQ ID NO: 448 - DNA, 21 bp, Artificial Sequence
  source: /note="Description of Artificial Sequence: Synthetic oligonucleotide"
  source: /note="Description of Combined DNA/RNA Molecule: Synthetic oligonucleotide"
uuguagucaaucaugcugctt

SEQ ID NO: 449 - DNA, 21 bp, Artificial Sequence
  source: /note="Description of Artificial Sequence: Synthetic oligonucleotide"
  source: /note="Description of Combined DNA/RNA Molecule: Synthetic oligonucleotide"
guuguagucaaucaugcugtt

SEQ ID NO: 450 - DNA, 21 bp, Artificial Sequence
  source: /note="Description of Artificial Sequence: Synthetic oligonucleotide"
  source: /note="Description of Combined DNA/RNA Molecule: Synthetic oligonucleotide"
gguuguagucaaucaugcutt

SEQ ID NO: 451 - DNA, 21 bp, Artificial Sequence
  source: /note="Description of Artificial Sequence: Synthetic oligonucleotide"
  source: /note="Description of Combined DNA/RNA Molecule: Synthetic oligonucleotide"
ggguuguagucaaucaugctt

SEQ ID NO: 452 - DNA, 21 bp, Artificial Sequence
  source: /note="Description of Artificial Sequence: Synthetic oligonucleotide"
  source: /note="Description of Combined DNA/RNA Molecule: Synthetic oligonucleotide"
aaguugucccaggcaaagatt

SEQ ID NO: 453 - DNA, 21 bp, Artificial Sequence
  source: /note="Description of Artificial Sequence: Synthetic oligonucleotide"
  source: /note="Description of Combined DNA/RNA Molecule: Synthetic oligonucleotide"
uucaaguugucccaggcaatt

SEQ ID NO: 454 - DNA, 21 bp, Artificial Sequence
  source: /note="Description of Artificial Sequence: Synthetic oligonucleotide"
  source: /note="Description of Combined DNA/RNA Molecule: Synthetic oligonucleotide"
auguucaaguugucccaggtt

SEQ ID NO: 455 - DNA, 21 bp, Artificial Sequence
  source: /note="Description of Artificial Sequence: Synthetic oligonucleotide"
  source: /note="Description of Combined DNA/RNA Molecule: Synthetic oligonucleotide"
cauguucaaguugucccagtt

SEQ ID NO: 456 - DNA, 21 bp, Artificial Sequence
  source: /note="Description of Artificial Sequence: Synthetic oligonucleotide"
  source: /note="Description of Combined DNA/RNA Molecule: Synthetic oligonucleotide"
ccauguucaaguugucccatt

SEQ ID NO: 457 - DNA, 21 bp, Artificial Sequence
  source: /note="Description of Artificial Sequence: Synthetic oligonucleotide"
  source: /note="Description of Combined DNA/RNA Molecule: Synthetic oligonucleotide"
accauguucaaguuguccctt

SEQ ID NO: 458 - DNA, 21 bp, Artificial Sequence
  source: /note="Description of Artificial Sequence: Synthetic oligonucleotide"
  source: /note="Description of Combined DNA/RNA Molecule: Synthetic oligonucleotide"
gaccauguucaaguugucctt

SEQ ID NO: 459 - DNA, 21 bp, Artificial Sequence
  source: /note="Description of Artificial Sequence: Synthetic oligonucleotide"
  source: /note="Description of Combined DNA/RNA Molecule: Synthetic oligonucleotide"
ugaccauguucaaguuguctt

SEQ ID NO: 460 - DNA, 21 bp, Artificial Sequence
  source: /note="Description of Artificial Sequence: Synthetic oligonucleotide"
  source: /note="Description of Combined DNA/RNA Molecule: Synthetic oligonucleotide"
gugaccauguucaaguugutt

SEQ ID NO: 461 - DNA, 21 bp, Artificial Sequence
  source: /note="Description of Artificial Sequence: Synthetic oligonucleotide"
  source: /note="Description of Combined DNA/RNA Molecule: Synthetic oligonucleotide"
agugaccauguucaaguugtt

SEQ ID NO: 462 - DNA, 21 bp, Artificial Sequence
  source: /note="Description of Artificial Sequence: Synthetic oligonucleotide"
  source: /note="Description of Combined DNA/RNA Molecule: Synthetic oligonucleotide"
uaagugaccauguucaagutt

SEQ ID NO: 463 - DNA, 21 bp, Artificial Sequence
  source: /note="Description of Artificial Sequence: Synthetic oligonucleotide"
  source: /note="Description of Combined DNA/RNA Molecule: Synthetic oligonucleotide"
auaagugaccauguucaagtt

SEQ ID NO: 464 - DNA, 21 bp, Artificial Sequence
  source: /note="Description of Artificial Sequence: Synthetic oligonucleotide"
  source: /note="Description of Combined DNA/RNA Molecule: Synthetic oligonucleotide"
cauaagugaccauguucaatt

SEQ ID NO: 465 - DNA, 21 bp, Artificial Sequence
  source: /note="Description of Artificial Sequence: Synthetic oligonucleotide"
  source: /note="Description of Combined DNA/RNA Molecule: Synthetic oligonucleotide"
ucauaagugaccauguucatt

SEQ ID NO: 466 - DNA, 21 bp, Artificial Sequence
  source: /note="Description of Artificial Sequence: Synthetic oligonucleotide"
  source: /note="Description of Combined DNA/RNA Molecule: Synthetic oligonucleotide"
gucauaagugaccauguuctt

SEQ ID NO: 467 - DNA, 21 bp, Artificial Sequence
  source: /note="Description of Artificial Sequence: Synthetic oligonucleotide"
  source: /note="Description of Combined DNA/RNA Molecule: Synthetic oligonucleotide"
ugucauaagugaccauguutt

SEQ ID NO: 468 - DNA, 21 bp, Artificial Sequence
  source: /note="Description of Artificial Sequence: Synthetic oligonucleotide"
  source: /note="Description of Combined DNA/RNA Molecule: Synthetic oligonucleotide"
augucauaagugaccaugutt

SEQ ID NO: 469 - DNA, 21 bp, Artificial Sequence
  source: /note="Description of Artificial Sequence: Synthetic oligonucleotide"
  source: /note="Description of Combined DNA/RNA Molecule: Synthetic oligonucleotide"
gaugucauaagugaccaugtt

SEQ ID NO: 470 - DNA, 21 bp, Artificial Sequence
  source: /note="Description of Artificial Sequence: Synthetic oligonucleotide"
  source: /note="Description of Combined DNA/RNA Molecule: Synthetic oligonucleotide"
uugaugucauaagugaccatt

SEQ ID NO: 471 - DNA, 21 bp, Artificial Sequence
  source: /note="Description of Artificial Sequence: Synthetic oligonucleotide"
  source: /note="Description of Combined DNA/RNA Molecule: Synthetic oligonucleotide"
cuugaugucauaagugacctt

SEQ ID NO: 472 - DNA, 21 bp, Artificial Sequence
  source: /note="Description of Artificial Sequence: Synthetic oligonucleotide"
  source: /note="Description of Combined DNA/RNA Molecule: Synthetic oligonucleotide"
gcuugaugucauaagugactt

SEQ ID NO: 473 - DNA, 21 bp, Artificial Sequence
  source: /note="Description of Artificial Sequence: Synthetic oligonucleotide"
  source: /note="Description of Combined DNA/RNA Molecule: Synthetic oligonucleotide"
aucuuggagagcuugaugutt

SEQ ID NO: 474 - DNA, 21 bp, Artificial Sequence
  source: /note="Description of Artificial Sequence: Synthetic oligonucleotide"
  source: /note="Description of Combined DNA/RNA Molecule: Synthetic oligonucleotide"
acaucuuggagagcuugautt

SEQ ID NO: 475 - DNA, 21 bp, Artificial Sequence
  source: /note="Description of Artificial Sequence: Synthetic oligonucleotide"
  source: /note="Description of Combined DNA/RNA Molecule: Synthetic oligonucleotide"
cacaucuuggagagcuugatt

SEQ ID NO: 476 - DNA, 21 bp, Artificial Sequence
  source: /note="Description of Artificial Sequence: Synthetic oligonucleotide"
  source: /note="Description of Combined DNA/RNA Molecule: Synthetic oligonucleotide"
uuucacaucuuggagagcutt

SEQ ID NO: 477 - DNA, 21 bp, Artificial Sequence
  source: /note="Description of Artificial Sequence: Synthetic oligonucleotide"
  source: /note="Description of Combined DNA/RNA Molecule: Synthetic oligonucleotide"
uuuucacaucuuggagagctt

SEQ ID NO: 478 - DNA, 21 bp, Artificial Sequence
  source: /note="Description of Artificial Sequence: Synthetic oligonucleotide"
  source: /note="Description of Combined DNA/RNA Molecule: Synthetic oligonucleotide"
cuuuucacaucuuggagagtt

SEQ ID NO: 479 - DNA, 21 bp, Artificial Sequence
  source: /note="Description of Artificial Sequence: Synthetic oligonucleotide"
  source: /note="Description of Combined DNA/RNA Molecule: Synthetic oligonucleotide"
gcuuuucacaucuuggagatt

SEQ ID NO: 480 - DNA, 21 bp, Artificial Sequence
  source: /note="Description of Artificial Sequence: Synthetic oligonucleotide"
  source: /note="Description of Combined DNA/RNA Molecule: Synthetic oligonucleotide"
aggcuuuucacaucuuggatt

SEQ ID NO: 481 - DNA, 21 bp, Artificial Sequence
  source: /note="Description of Artificial Sequence: Synthetic oligonucleotide"
  source: /note="Description of Combined DNA/RNA Molecule: Synthetic oligonucleotide"
gaggcuuuucacaucuuggtt

SEQ ID NO: 482 - DNA, 21 bp, Artificial Sequence
  source: /note="Description of Artificial Sequence: Synthetic oligonucleotide"
  source: /note="Description of Combined DNA/RNA Molecule: Synthetic oligonucleotide"
auggugaccauguucaucctt

SEQ ID NO: 483 - DNA, 21 bp, Artificial Sequence
  source: /note="Description of Artificial Sequence: Synthetic oligonucleotide"
  source: /note="Description of Combined DNA/RNA Molecule: Synthetic oligonucleotide"
ccucagacuacaauuccugtt

SEQ ID NO: 484 - DNA, 21 bp, Artificial Sequence
  source: /note="Description of Artificial Sequence: Synthetic oligonucleotide"
  source: /note="Description of Combined DNA/RNA Molecule: Synthetic oligonucleotide"
cccucagacuacaauuccutt

SEQ ID NO: 485 - DNA, 21 bp, Artificial Sequence
  source: /note="Description of Artificial Sequence: Synthetic oligonucleotide"
  source: /note="Description of Combined DNA/RNA Molecule: Synthetic oligonucleotide"
cauaaaugcugacagaagatt

SEQ ID NO: 486 - DNA, 21 bp, Artificial Sequence
  source: /note="Description of Artificial Sequence: Synthetic oligonucleotide"
  source: /note="Description of Combined DNA/RNA Molecule: Synthetic oligonucleotide"
ccauaaaugcugacagaagtt

SEQ ID NO: 487 - DNA, 21 bp, Artificial Sequence
  source: /note="Description of Artificial Sequence: Synthetic oligonucleotide"
  source: /note="Description of Combined DNA/RNA Molecule: Synthetic oligonucleotide"
cccauaaaugcugacagaatt

SEQ ID NO: 488 - DNA, 21 bp, Artificial Sequence
  source: /note="Description of Artificial Sequence: Synthetic oligonucleotide"
  source: /note="Description of Combined DNA/RNA Molecule: Synthetic oligonucleotide"
aucccauaaaugcugacagtt

SEQ ID NO: 489 - DNA, 21 bp, Artificial Sequence
  source: /note="Description of Artificial Sequence: Synthetic oligonucleotide"
  source: /note="Description of Combined DNA/RNA Molecule: Synthetic oligonucleotide"
caucccauaaaugcugacatt

SEQ ID NO: 490 - DNA, 21 bp, Artificial Sequence
  source: /note="Description of Artificial Sequence: Synthetic oligonucleotide"
  source: /note="Description of Combined DNA/RNA Molecule: Synthetic oligonucleotide"
acaucccauaaaugcugactt

SEQ ID NO: 491 - DNA, 21 bp, Artificial Sequence
  source: /note="Description of Artificial Sequence: Synthetic oligonucleotide"
  source: /note="Description of Combined DNA/RNA Molecule: Synthetic oligonucleotide"
aacaucccauaaaugcugatt

SEQ ID NO: 492 - DNA, 21 bp, Artificial Sequence
  source: /note="Description of Artificial Sequence: Synthetic oligonucleotide"
  source: /note="Description of Combined DNA/RNA Molecule: Synthetic oligonucleotide"
aaacaucccauaaaugcugtt

SEQ ID NO: 493 - DNA, 21 bp, Artificial Sequence
  source: /note="Description of Artificial Sequence: Synthetic oligonucleotide"
  source: /note="Description of Combined DNA/RNA Molecule: Synthetic oligonucleotide"
uaaacaucccauaaaugcutt

SEQ ID NO: 494 - DNA, 21 bp, Artificial Sequence
  source: /note="Description of Artificial Sequence: Synthetic oligonucleotide"
  source: /note="Description of Combined DNA/RNA Molecule: Synthetic oligonucleotide"
uuaaacaucccauaaaugctt

SEQ ID NO: 495 - DNA, 21 bp, Artificial Sequence
  source: /note="Description of Artificial Sequence: Synthetic oligonucleotide"
  source: /note="Description of Combined DNA/RNA Molecule: Synthetic oligonucleotide"
auuaaacaucccauaaaugtt

SEQ ID NO: 496 - DNA, 21 bp, Artificial Sequence
  source: /note="Description of Artificial Sequence: Synthetic oligonucleotide"
  source: /note="Description of Combined DNA/RNA Molecule: Synthetic oligonucleotide"
cauuaaacaucccauaaautt

SEQ ID NO: 497 - DNA, 21 bp, Artificial Sequence
  source: /note="Description of Artificial Sequence: Synthetic oligonucleotide"
  source: /note="Description of Combined DNA/RNA Molecule: Synthetic oligonucleotide"
ucauuaaacaucccauaaatt

SEQ ID NO: 498 - DNA, 21 bp, Artificial Sequence
  source: /note="Description of Artificial Sequence: Synthetic oligonucleotide"
  source: /note="Description of Combined DNA/RNA Molecule: Synthetic oligonucleotide"
gucauuaaacaucccauaatt

SEQ ID NO: 499 - DNA, 21 bp, Artificial Sequence
  source: /note="Description of Artificial Sequence: Synthetic oligonucleotide"
  source: /note="Description of Combined DNA/RNA Molecule: Synthetic oligonucleotide"
augucauuaaacaucccautt

SEQ ID NO: 500 - DNA, 21 bp, Artificial Sequence
  source: /note="Description of Artificial Sequence: Synthetic oligonucleotide"
  source: /note="Description of Combined DNA/RNA Molecule: Synthetic oligonucleotide"
uaugucauuaaacaucccatt

SEQ ID NO: 501 - DNA, 21 bp, Artificial Sequence
  source: /note="Description of Artificial Sequence: Synthetic oligonucleotide"
  source: /note="Description of Combined DNA/RNA Molecule: Synthetic oligonucleotide"
cuaugucauuaaacauccctt

SEQ ID NO: 502 - DNA, 21 bp, Artificial Sequence
  source: /note="Description of Artificial Sequence: Synthetic oligonucleotide"
  source: /note="Description of Combined DNA/RNA Molecule: Synthetic oligonucleotide"
acuaugucauuaaacaucctt

SEQ ID NO: 503 - DNA, 21 bp, Artificial Sequence
  source: /note="Description of Artificial Sequence: Synthetic oligonucleotide"
  source: /note="Description of Combined DNA/RNA Molecule: Synthetic oligonucleotide"
aacuaugucauuaaacauctt

SEQ ID NO: 504 - DNA, 21 bp, Artificial Sequence
  source: /note="Description of Artificial Sequence: Synthetic oligonucleotide"
  source: /note="Description of Combined DNA/RNA Molecule: Synthetic oligonucleotide"
gaacuaugucauuaaacautt

SEQ ID NO: 505 - DNA, 21 bp, Artificial Sequence
  source: /note="Description of Artificial Sequence: Synthetic oligonucleotide"
  source: /note="Description of Combined DNA/RNA Molecule: Synthetic oligonucleotide"
ugaacuaugucauuaaacatt

SEQ ID NO: 506 - DNA, 21 bp, Artificial Sequence
  source: /note="Description of Artificial Sequence: Synthetic oligonucleotide"
  source: /note="Description of Combined DNA/RNA Molecule: Synthetic oligonucleotide"
uugaacuaugucauuaaactt

SEQ ID NO: 507 - DNA, 21 bp, Artificial Sequence
  source: /note="Description of Artificial Sequence: Synthetic oligonucleotide"
  source: /note="Description of Combined DNA/RNA Molecule: Synthetic oligonucleotide"
cuugaacuaugucauuaaatt

SEQ ID NO: 508 - DNA, 21 bp, Artificial Sequence
  source: /note="Description of Artificial Sequence: Synthetic oligonucleotide"
  source: /note="Description of Combined DNA/RNA Molecule: Synthetic oligonucleotide"
acuugaacuaugucauuaatt

SEQ ID NO: 509 - DNA, 21 bp, Artificial Sequence
  source: /note="Description of Artificial Sequence: Synthetic oligonucleotide"
  source: /note="Description of Combined DNA/RNA Molecule: Synthetic oligonucleotide"
aacuugaacuaugucauuatt

SEQ ID NO: 510 - DNA, 21 bp, Artificial Sequence
  source: /note="Description of Artificial Sequence: Synthetic oligonucleotide"
  source: /note="Description of Combined DNA/RNA Molecule: Synthetic oligonucleotide"
aaacuugaacuaugucauutt

SEQ ID NO: 511 - DNA, 21 bp, Artificial Sequence
  source: /note="Description of Artificial Sequence: Synthetic oligonucleotide"
  source: /note="Description of Combined DNA/RNA Molecule: Synthetic oligonucleotide"
aaaacuugaacuaugucautt

SEQ ID NO: 512 - DNA, 21 bp, Artificial Sequence
  source: /note="Description of Artificial Sequence: Synthetic oligonucleotide"
  source: /note="Description of Combined DNA/RNA Molecule: Synthetic oligonucleotide"
gaaaacuugaacuaugucatt

SEQ ID NO: 513 - DNA, 21 bp, Artificial Sequence
  source: /note="Description of Artificial Sequence: Synthetic oligonucleotide"
  source: /note="Description of Combined DNA/RNA Molecule: Synthetic oligonucleotide"
agaaaacuugaacuauguctt

SEQ ID NO: 514 - DNA, 21 bp, Artificial Sequence
  source: /note="Description of Artificial Sequence: Synthetic oligonucleotide"
  source: /note="Description of Combined DNA/RNA Molecule: Synthetic oligonucleotide"
aagaaaacuugaacuaugutt

SEQ ID NO: 515 - DNA, 21 bp, Artificial Sequence
  source: /note="Description of Artificial Sequence: Synthetic oligonucleotide"
  source: /note="Description of Combined DNA/RNA Molecule: Synthetic oligonucleotide"
caagaaaacuugaacuaugtt

SEQ ID NO: 516 - DNA, 21 bp, Artificial Sequence
  source: /note="Description of Artificial Sequence: Synthetic oligonucleotide"
  source: /note="Description of Combined DNA/RNA Molecule: Synthetic oligonucleotide"
acaagaaaacuugaacuautt

SEQ ID NO: 517 - DNA, 21 bp, Artificial Sequence
  source: /note="Description of Artificial Sequence: Synthetic oligonucleotide"
  source: /note="Description of Combined DNA/RNA Molecule: Synthetic oligonucleotide"
cacaagaaaacuugaacuatt

SEQ ID NO: 518 - DNA, 21 bp, Artificial Sequence
  source: /note="Description of Artificial Sequence: Synthetic oligonucleotide"
  source: /note="Description of Combined DNA/RNA Molecule: Synthetic oligonucleotide"
ucacaagaaaacuugaacutt

SEQ ID NO: 519 - DNA, 21 bp, Artificial Sequence
  source: /note="Description of Artificial Sequence: Synthetic oligonucleotide"
  source: /note="Description of Combined DNA/RNA Molecule: Synthetic oligonucleotide"
aucacaagaaaacuugaactt

SEQ ID NO: 520 - DNA, 21 bp, Artificial Sequence
  source: /note="Description of Artificial Sequence: Synthetic oligonucleotide"
  source: /note="Description of Combined DNA/RNA Molecule: Synthetic oligonucleotide"
aaucacaagaaaacuugaatt

SEQ ID NO: 521 - DNA, 21 bp, Artificial Sequence
  source: /note="Description of Artificial Sequence: Synthetic oligonucleotide"
  source: /note="Description of Combined DNA/RNA Molecule: Synthetic oligonucleotide"
aaaucacaagaaaacuugatt

SEQ ID NO: 522 - DNA, 21 bp, Artificial Sequence
  source: /note="Description of Artificial Sequence: Synthetic oligonucleotide"
  source: /note="Description of Combined DNA/RNA Molecule: Synthetic oligonucleotide"
caaaucacaagaaaacuugtt

SEQ ID NO: 523 - DNA, 21 bp, Artificial Sequence
  source: /note="Description of Artificial Sequence: Synthetic oligonucleotide"
  source: /note="Description of Combined DNA/RNA Molecule: Synthetic oligonucleotide"
ccaaaucacaagaaaacuutt

SEQ ID NO: 524 - DNA, 21 bp, Artificial Sequence
  source: /note="Description of Artificial Sequence: Synthetic oligonucleotide"
  source: /note="Description of Combined DNA/RNA Molecule: Synthetic oligonucleotide"
cccaaaucacaagaaaacutt

SEQ ID NO: 525 - DNA, 21 bp, Artificial Sequence
  source: /note="Description of Artificial Sequence: Synthetic oligonucleotide"
  source: /note="Description of Combined DNA/RNA Molecule: Synthetic oligonucleotide"
ccccaaaucacaagaaaactt

SEQ ID NO: 526 - DNA, 21 bp, Artificial Sequence
  source: /note="Description of Artificial Sequence: Synthetic oligonucleotide"
  source: /note="Description of Combined DNA/RNA Molecule: Synthetic oligonucleotide"
gcuuuugccccaaaucacatt

SEQ ID NO: 527 - DNA, 21 bp, Artificial Sequence
  source: /note="Description of Artificial Sequence: Synthetic oligonucleotide"
  source: /note="Description of Combined DNA/RNA Molecule: Synthetic oligonucleotide"
agcuuuugccccaaaucactt

SEQ ID NO: 528 - DNA, 21 bp, Artificial Sequence
  source: /note="Description of Artificial Sequence: Synthetic oligonucleotide"
  source: /note="Description of Combined DNA/RNA Molecule: Synthetic oligonucleotide"
cagcuuuugccccaaaucatt

SEQ ID NO: 529 - DNA, 21 bp, Artificial Sequence
  source: /note="Description of Artificial Sequence: Synthetic oligonucleotide"
  source: /note="Description of Combined DNA/RNA Molecule: Synthetic oligonucleotide"
gguuuucaggaagaaacuatt

SEQ ID NO: 530 - DNA, 21 bp, Artificial Sequence
  source: /note="Description of Artificial Sequence: Synthetic oligonucleotide"
  source: /note="Description of Combined DNA/RNA Molecule: Synthetic oligonucleotide"
ugguuuucaggaagaaacutt

SEQ ID NO: 531 - DNA, 21 bp, Artificial Sequence
  source: /note="Description of Artificial Sequence: Synthetic oligonucleotide"
  source: /note="Description of Combined DNA/RNA Molecule: Synthetic oligonucleotide"
augguuuucaggaagaaactt

SEQ ID NO: 532 - DNA, 21 bp, Artificial Sequence
  source: /note="Description of Artificial Sequence: Synthetic oligonucleotide"
  source: /note="Description of Combined DNA/RNA Molecule: Synthetic oligonucleotide"
aaugguuuucaggaagaaatt

SEQ ID NO: 533 - DNA, 21 bp, Artificial Sequence
  source: /note="Description of Artificial Sequence: Synthetic oligonucleotide"
  source: /note="Description of Combined DNA/RNA Molecule: Synthetic oligonucleotide"
caaugguuuucaggaagaatt

SEQ ID NO: 534 - DNA, 21 bp, Artificial Sequence
  source: /note="Description of Artificial Sequence: Synthetic oligonucleotide"
  source: /note="Description of Combined DNA/RNA Molecule: Synthetic oligonucleotide"
gcaaugguuuucaggaagatt

SEQ ID NO: 535 - DNA, 21 bp, Artificial Sequence
  source: /note="Description of Artificial Sequence: Synthetic oligonucleotide"
  source: /note="Description of Combined DNA/RNA Molecule: Synthetic oligonucleotide"
agcaaugguuuucaggaagtt

SEQ ID NO: 536 - DNA, 21 bp, Artificial Sequence
  source: /note="Description of Artificial Sequence: Synthetic oligonucleotide"
  source: /note="Description of Combined DNA/RNA Molecule: Synthetic oligonucleotide"
gagcaaugguuuucaggaatt

SEQ ID NO: 537 - DNA, 21 bp, Artificial Sequence
  source: /note="Description of Artificial Sequence: Synthetic oligonucleotide"
  source: /note="Description of Combined DNA/RNA Molecule: Synthetic oligonucleotide"
agagcaaugguuuucaggatt

SEQ ID NO: 538 - DNA, 21 bp, Artificial Sequence
  source: /note="Description of Artificial Sequence: Synthetic oligonucleotide"
  source: /note="Description of Combined DNA/RNA Molecule: Synthetic oligonucleotide"
aagagcaaugguuuucaggtt

SEQ ID NO: 539 - DNA, 21 bp, Artificial Sequence
  source: /note="Description of Artificial Sequence: Synthetic oligonucleotide"
  source: /note="Description of Combined DNA/RNA Molecule: Synthetic oligonucleotide"
caagagcaaugguuuucagtt

SEQ ID NO: 540 - DNA, 21 bp, Artificial Sequence
  source: /note="Description of Artificial Sequence: Synthetic oligonucleotide"
  source: /note="Description of Combined DNA/RNA Molecule: Synthetic oligonucleotide"
acaugcaagagcaaugguutt

SEQ ID NO: 541 - DNA, 21 bp, Artificial Sequence
  source: /note="Description of Artificial Sequence: Synthetic oligonucleotide"
  source: /note="Description of Combined DNA/RNA Molecule: Synthetic oligonucleotide"
uaacaugcaagagcaauggtt

SEQ ID NO: 542 - DNA, 21 bp, Artificial Sequence
  source: /note="Description of Artificial Sequence: Synthetic oligonucleotide"
  source: /note="Description of Combined DNA/RNA Molecule: Synthetic oligonucleotide"
guaacaugcaagagcaaugtt

SEQ ID NO: 543 - DNA, 21 bp, Artificial Sequence
  source: /note="Description of Artificial Sequence: Synthetic oligonucleotide"
  source: /note="Description of Combined DNA/RNA Molecule: Synthetic oligonucleotide"
uguaacaugcaagagcaautt

SEQ ID NO: 544 - DNA, 21 bp, Artificial Sequence
  source: /note="Description of Artificial Sequence: Synthetic oligonucleotide"
  source: /note="Description of Combined DNA/RNA Molecule: Synthetic oligonucleotide"
auguaacaugcaagagcaatt

SEQ ID NO: 545 - DNA, 21 bp, Artificial Sequence
  source: /note="Description of Artificial Sequence: Synthetic oligonucleotide"
  source: /note="Description of Combined DNA/RNA Molecule: Synthetic oligonucleotide"
cauguaacaugcaagagcatt

SEQ ID NO: 546 - DNA, 21 bp, Artificial Sequence
  source: /note="Description of Artificial Sequence: Synthetic oligonucleotide"
  source: /note="Description of Combined DNA/RNA Molecule: Synthetic oligonucleotide"
ccauguaacaugcaagagctt

SEQ ID NO: 547 - DNA, 21 bp, Artificial Sequence
  source: /note="Description of Artificial Sequence: Synthetic oligonucleotide"
  source: /note="Description of Combined DNA/RNA Molecule: Synthetic oligonucleotide"
accauguaacaugcaagagtt

SEQ ID NO: 548 - DNA, 21 bp, Artificial Sequence
  source: /note="Description of Artificial Sequence: Synthetic oligonucleotide"
  source: /note="Description of Combined DNA/RNA Molecule: Synthetic oligonucleotide"
aaccauguaacaugcaagatt

SEQ ID NO: 549 - DNA, 21 bp, Artificial Sequence
  source: /note="Description of Artificial Sequence: Synthetic oligonucleotide"
  source: /note="Description of Combined DNA/RNA Molecule: Synthetic oligonucleotide"
uaaccauguaacaugcaagtt

SEQ ID NO: 550 - DNA, 21 bp, Artificial Sequence
  source: /note="Description of Artificial Sequence: Synthetic oligonucleotide"
  source: /note="Description of Combined DNA/RNA Molecule: Synthetic oligonucleotide"
guaaccauguaacaugcaatt

SEQ ID NO: 551 - DNA, 21 bp, Artificial Sequence
  source: /note="Description of Artificial Sequence: Synthetic oligonucleotide"
  source: /note="Description of Combined DNA/RNA Molecule: Synthetic oligonucleotide"
gguaaccauguaacaugcatt

SEQ ID NO: 552 - DNA, 21 bp, Artificial Sequence
  source: /note="Description of Artificial Sequence: Synthetic oligonucleotide"
  source: /note="Description of Combined DNA/RNA Molecule: Synthetic oligonucleotide"
ugguaaccauguaacaugctt

SEQ ID NO: 553 - DNA, 21 bp, Artificial Sequence
  source: /note="Description of Artificial Sequence: Synthetic oligonucleotide"
  source: /note="Description of Combined DNA/RNA Molecule: Synthetic oligonucleotide"
ugugguaaccauguaacautt

SEQ ID NO: 554 - DNA, 21 bp, Artificial Sequence
  source: /note="Description of Artificial Sequence: Synthetic oligonucleotide"
  source: /note="Description of Combined DNA/RNA Molecule: Synthetic oligonucleotide"
uugugguaaccauguaacatt

SEQ ID NO: 555 - DNA, 21 bp, Artificial Sequence
  source: /note="Description of Artificial Sequence: Synthetic oligonucleotide"
  source: /note="Description of Combined DNA/RNA Molecule: Synthetic oligonucleotide"
uuguggcuugugguaaccatt

SEQ ID NO: 556 - DNA, 21 bp, Artificial Sequence
  source: /note="Description of Artificial Sequence: Synthetic oligonucleotide"
  source: /note="Description of Combined DNA/RNA Molecule: Synthetic oligonucleotide"
auuguggcuugugguaacctt

SEQ ID NO: 557 - DNA, 21 bp, Artificial Sequence
  source: /note="Description of Artificial Sequence: Synthetic oligonucleotide"
  source: /note="Description of Combined DNA/RNA Molecule: Synthetic oligonucleotide"
uauuguggcuugugguaactt

SEQ ID NO: 558 - DNA, 21 bp, Artificial Sequence
  source: /note="Description of Artificial Sequence: Synthetic oligonucleotide"
  source: /note="Description of Combined DNA/RNA Molecule: Synthetic oligonucleotide"
cuuuagaaguuaugcuuuutt

SEQ ID NO: 559 - DNA, 21 bp, Artificial Sequence
  source: /note="Description of Artificial Sequence: Synthetic oligonucleotide"
  source: /note="Description of Combined DNA/RNA Molecule: Synthetic oligonucleotide"
ccuuuagaaguuaugcuuutt

SEQ ID NO: 560 - DNA, 21 bp, Artificial Sequence
  source: /note="Description of Artificial Sequence: Synthetic oligonucleotide"
  source: /note="Description of Combined DNA/RNA Molecule: Synthetic oligonucleotide"
uccuuuagaaguuaugcuutt

SEQ ID NO: 561 - DNA, 21 bp, Artificial Sequence
  source: /note="Description of Artificial Sequence: Synthetic oligonucleotide"
  source: /note="Description of Combined DNA/RNA Molecule: Synthetic oligonucleotide"
uuccuuuagaaguuaugcutt

SEQ ID NO: 562 - DNA, 21 bp, Artificial Sequence
  source: /note="Description of Artificial Sequence: Synthetic oligonucleotide"
  source: /note="Description of Combined DNA/RNA Molecule: Synthetic oligonucleotide"
cuuccuuuagaaguuaugctt

SEQ ID NO: 563 - DNA, 21 bp, Artificial Sequence
  source: /note="Description of Artificial Sequence: Synthetic oligonucleotide"
  source: /note="Description of Combined DNA/RNA Molecule: Synthetic oligonucleotide"
gcuuccuuuagaaguuaugtt

SEQ ID NO: 564 - DNA, 21 bp, Artificial Sequence
  source: /note="Description of Artificial Sequence: Synthetic oligonucleotide"
  source: /note="Description of Combined DNA/RNA Molecule: Synthetic oligonucleotide"
ugcuuccuuuagaaguuautt

SEQ ID NO: 565 - DNA, 21 bp, Artificial Sequence
  source: /note="Description of Artificial Sequence: Synthetic oligonucleotide"
  source: /note="Description of Combined DNA/RNA Molecule: Synthetic oligonucleotide"
uucugcuuccuuuagaagutt

SEQ ID NO: 566 - DNA, 21 bp, Artificial Sequence
  source: /note="Description of Artificial Sequence: Synthetic oligonucleotide"
  source: /note="Description of Combined DNA/RNA Molecule: Synthetic oligonucleotide"
uauucugcuuccuuuagaatt

SEQ ID NO: 567 - DNA, 21 bp, Artificial Sequence
  source: /note="Description of Artificial Sequence: Synthetic oligonucleotide"
  source: /note="Description of Combined DNA/RNA Molecule: Synthetic oligonucleotide"
cuauucugcuuccuuuagatt

SEQ ID NO: 568 - DNA, 21 bp, Artificial Sequence
  source: /note="Description of Artificial Sequence: Synthetic oligonucleotide"
  source: /note="Description of Combined DNA/RNA Molecule: Synthetic oligonucleotide"
gcuauucugcuuccuuuagtt

SEQ ID NO: 569 - DNA, 21 bp, Artificial Sequence
  source: /note="Description of Artificial Sequence: Synthetic oligonucleotide"
  source: /note="Description of Combined DNA/RNA Molecule: Synthetic oligonucleotide"
gagcuauucugcuuccuuutt

SEQ ID NO: 570 - DNA, 21 bp, Artificial Sequence
  source: /note="Description of Artificial Sequence: Synthetic oligonucleotide"
  source: /note="Description of Combined DNA/RNA Molecule: Synthetic oligonucleotide"
guaaaugcaucuuacuuautt

SEQ ID NO: 571 - DNA, 21 bp, Artificial Sequence
  source: /note="Description of Artificial Sequence: Synthetic oligonucleotide"
  source: /note="Description of Combined DNA/RNA Molecule: Synthetic oligonucleotide"
aguaaaugcaucuuacuuatt

SEQ ID NO: 572 - DNA, 21 bp, Artificial Sequence
  source: /note="Description of Artificial Sequence: Synthetic oligonucleotide"
  source: /note="Description of Combined DNA/RNA Molecule: Synthetic oligonucleotide"
uaguaaaugcaucuuacuutt

SEQ ID NO: 573 - DNA, 21 bp, Artificial Sequence
  source: /note="Description of Artificial Sequence: Synthetic oligonucleotide"
  source: /note="Description of Combined DNA/RNA Molecule: Synthetic oligonucleotide"
guaguaaaugcaucuuacutt

SEQ ID NO: 574 - DNA, 21 bp, Artificial Sequence
  source: /note="Description of Artificial Sequence: Synthetic oligonucleotide"
  source: /note="Description of Combined DNA/RNA Molecule: Synthetic oligonucleotide"
uguaguaaaugcaucuuactt

SEQ ID NO: 575 - DNA, 21 bp, Artificial Sequence
  source: /note="Description of Artificial Sequence: Synthetic oligonucleotide"
  source: /note="Description of Combined DNA/RNA Molecule: Synthetic oligonucleotide"
cuguaguaaaugcaucuuatt

SEQ ID NO: 576 - DNA, 21 bp, Artificial Sequence
  source: /note="Description of Artificial Sequence: Synthetic oligonucleotide"
  source: /note="Description of Combined DNA/RNA Molecule: Synthetic oligonucleotide"
cugaagcauuagaagccaatt

SEQ ID NO: 577 - DNA, 21 bp, Artificial Sequence
  source: /note="Description of Artificial Sequence: Synthetic oligonucleotide"
  source: /note="Description of Combined DNA/RNA Molecule: Synthetic oligonucleotide"
ucugaagcauuagaagccatt

SEQ ID NO: 578 - DNA, 21 bp, Artificial Sequence
  source: /note="Description of Artificial Sequence: Synthetic oligonucleotide"
  source: /note="Description of Combined DNA/RNA Molecule: Synthetic oligonucleotide"
aucugaagcauuagaagcctt

SEQ ID NO: 579 - DNA, 21 bp, Artificial Sequence
  source: /note="Description of Artificial Sequence: Synthetic oligonucleotide"
  source: /note="Description of Combined DNA/RNA Molecule: Synthetic oligonucleotide"
uaucugaagcauuagaagctt

SEQ ID NO: 580 - DNA, 21 bp, Artificial Sequence
  source: /note="Description of Artificial Sequence: Synthetic oligonucleotide"
  source: /note="Description of Combined DNA/RNA Molecule: Synthetic oligonucleotide"
uucuaucugaagcauuagatt

SEQ ID NO: 581 - DNA, 21 bp, Artificial Sequence
  source: /note="Description of Artificial Sequence: Synthetic oligonucleotide"
  source: /note="Description of Combined DNA/RNA Molecule: Synthetic oligonucleotide"
auucuaucugaagcauuagtt

SEQ ID NO: 582 - DNA, 21 bp, Artificial Sequence
  source: /note="Description of Artificial Sequence: Synthetic oligonucleotide"
  source: /note="Description of Combined DNA/RNA Molecule: Synthetic oligonucleotide"
uauucuaucugaagcauuatt

SEQ ID NO: 583 - DNA, 21 bp, Artificial Sequence
  source: /note="Description of Artificial Sequence: Synthetic oligonucleotide"
  source: /note="Description of Combined DNA/RNA Molecule: Synthetic oligonucleotide"
guauucuaucugaagcauutt

SEQ ID NO: 584 - DNA, 21 bp, Artificial Sequence
  source: /note="Description of Artificial Sequence: Synthetic oligonucleotide"
  source: /note="Description of Combined DNA/RNA Molecule: Synthetic oligonucleotide"
uguauucuaucugaagcautt

SEQ ID NO: 585 - DNA, 21 bp, Artificial Sequence
  source: /note="Description of Artificial Sequence: Synthetic oligonucleotide"
  source: /note="Description of Combined DNA/RNA Molecule: Synthetic oligonucleotide"
cuguauucuaucugaagcatt

SEQ ID NO: 586 - DNA, 21 bp, Artificial Sequence
  source: /note="Description of Artificial Sequence: Synthetic oligonucleotide"
  source: /note="Description of Combined DNA/RNA Molecule: Synthetic oligonucleotide"
acuguauucuaucugaagctt

SEQ ID NO: 587 - DNA, 21 bp, Artificial Sequence
  source: /note="Description of Artificial Sequence: Synthetic oligonucleotide"
  source: /note="Description of Combined DNA/RNA Molecule: Synthetic oligonucleotide"
aacuguauucuaucugaagtt

SEQ ID NO: 588 - DNA, 21 bp, Artificial Sequence
  source: /note="Description of Artificial Sequence: Synthetic oligonucleotide"
  source: /note="Description of Combined DNA/RNA Molecule: Synthetic oligonucleotide"
caacuguauucuaucugaatt

SEQ ID NO: 589 - DNA, 21 bp, Artificial Sequence
  source: /note="Description of Artificial Sequence: Synthetic oligonucleotide"
  source: /note="Description of Combined DNA/RNA Molecule: Synthetic oligonucleotide"
ccaacuguauucuaucugatt

SEQ ID NO: 590 - DNA, 21 bp, Artificial Sequence
  source: /note="Description of Artificial Sequence: Synthetic oligonucleotide"
  source: /note="Description of Combined DNA/RNA Molecule: Synthetic oligonucleotide"
cccaacuguauucuaucugtt

SEQ ID NO: 591 - DNA, 21 bp, Artificial Sequence
  source: /note="Description of Artificial Sequence: Synthetic oligonucleotide"
  source: /note="Description of Combined DNA/RNA Molecule: Synthetic oligonucleotide"
aaaauuuuauuucacaaugtt

SEQ ID NO: 592 - DNA, 21 bp, Artificial Sequence
  source: /note="Description of Artificial Sequence: Synthetic oligonucleotide"
  source: /note="Description of Combined DNA/RNA Molecule: Synthetic oligonucleotide"
gaaaauuuuauuucacaautt

SEQ ID NO: 593 - DNA, 21 bp, Artificial Sequence
  source: /note="Description of Artificial Sequence: Synthetic oligonucleotide"
  source: /note="Description of Combined DNA/RNA Molecule: Synthetic oligonucleotide"
agaaaauuuuauuucacaatt

SEQ ID NO: 594 - DNA, 21 bp, Artificial Sequence
  source: /note="Description of Artificial Sequence: Synthetic oligonucleotide"
  source: /note="Description of Combined DNA/RNA Molecule: Synthetic oligonucleotide"
aagaaaauuuuauuucacatt

SEQ ID NO: 595 - DNA, 21 bp, Artificial Sequence
  source: /note="Description of Artificial Sequence: Synthetic oligonucleotide"
  source: /note="Description of Combined DNA/RNA Molecule: Synthetic oligonucleotide"
uaagaaaauuuuauuucactt

SEQ ID NO: 596 - DNA, 21 bp, Artificial Sequence
  source: /note="Description of Artificial Sequence: Synthetic oligonucleotide"
  source: /note="Description of Combined DNA/RNA Molecule: Synthetic oligonucleotide"
guaagaaaauuuuauuucatt

SEQ ID NO: 597 - DNA, 21 bp, Artificial Sequence
  source: /note="Description of Artificial Sequence: Synthetic oligonucleotide"
  source: /note="Description of Combined DNA/RNA Molecule: Synthetic oligonucleotide"
gguaagaaaauuuuauuuctt

SEQ ID NO: 598 - DNA, 21 bp, Artificial Sequence
  source: /note="Description of Artificial Sequence: Synthetic oligonucleotide"
  source: /note="Description of Combined DNA/RNA Molecule: Synthetic oligonucleotide"
ggguaagaaaauuuuauuutt

SEQ ID NO: 599 - DNA, 21 bp, Artificial Sequence
  source: /note="Description of Artificial Sequence: Synthetic oligonucleotide"
  source: /note="Description of Combined DNA/RNA Molecule: Synthetic oligonucleotide"
uggguaagaaaauuuuauutt

SEQ ID NO: 600 - DNA, 21 bp, Artificial Sequence
  source: /note="Description of Artificial Sequence: Synthetic oligonucleotide"
  source: /note="Description of Combined DNA/RNA Molecule: Synthetic oligonucleotide"
uuggguaagaaaauuuuautt

SEQ ID NO: 601 - RNA, 19 nt, Artificial Sequence
  source: /note="Description of Artificial Sequence: Synthetic oligonucleotide"
cagucccaaugaauccagc

SEQ ID NO: 602 - RNA, 19 nt, Artificial Sequence
  source: /note="Description of Artificial Sequence: Synthetic oligonucleotide"
agucccaaugaauccagcu

SEQ ID NO: 603 - RNA, 19 nt, Artificial Sequence
  source: /note="Description of Artificial Sequence: Synthetic oligonucleotide"
gucccaaugaauccagcug

SEQ ID NO: 604 - RNA, 19 nt, Artificial Sequence
  source: /note="Description of Artificial Sequence: Synthetic oligonucleotide"
ccaugucagucauccauaa

SEQ ID NO: 605 - RNA, 19 nt, Artificial Sequence
  source: /note="Description of Artificial Sequence: Synthetic oligonucleotide"
augucagucauccauaacu

SEQ ID NO: 606 - RNA, 19 nt, Artificial Sequence
  source: /note="Description of Artificial Sequence: Synthetic oligonucleotide"
gcuggaaacccaaaccaga

SEQ ID NO: 607 - RNA, 19 nt, Artificial Sequence
  source: /note="Description of Artificial Sequence: Synthetic oligonucleotide"
aaacccaaaccagagaguu

SEQ ID NO: 608 - RNA, 19 nt, Artificial Sequence
  source: /note="Description of Artificial Sequence: Synthetic oligonucleotide"
aacccaaaccagagaguug

SEQ ID NO: 609 - RNA, 19 nt, Artificial Sequence
  source: /note="Description of Artificial Sequence: Synthetic oligonucleotide"
ccgagacaagucaguucug

SEQ ID NO: 610 - RNA, 19 nt, Artificial Sequence
  source: /note="Description of Artificial Sequence: Synthetic oligonucleotide"
gagacaagucaguucugga

SEQ ID NO: 611 - RNA, 19 nt, Artificial Sequence
  source: /note="Description of Artificial Sequence: Synthetic oligonucleotide"
agacaagucaguucuggag

SEQ ID NO: 612 - RNA, 19 nt, Artificial Sequence
  source: /note="Description of Artificial Sequence: Synthetic oligonucleotide"
caguucuggaggaagagaa

SEQ ID NO: 613 - RNA, 19 nt, Artificial Sequence
  source: /note="Description of Artificial Sequence: Synthetic oligonucleotide"
aguucuggaggaagagaag

SEQ ID NO: 614 - RNA, 19 nt, Artificial Sequence
  source: /note="Description of Artificial Sequence: Synthetic oligonucleotide"
ucuggaggaagagaagaag

SEQ ID NO: 615 - RNA, 19 nt, Artificial Sequence
  source: /note="Description of Artificial Sequence: Synthetic oligonucleotide"
aggcuccagagaaguuucu

SEQ ID NO: 616 - RNA, 19 nt, Artificial Sequence
  source: /note="Description of Artificial Sequence: Synthetic oligonucleotide"
ggcuccagagaaguuucua

SEQ ID NO: 617 - RNA, 19 nt, Artificial Sequence
  source: /note="Description of Artificial Sequence: Synthetic oligonucleotide"
gcuccagagaaguuucuac

SEQ ID NO: 618 - RNA, 19 nt, Artificial Sequence
  source: /note="Description of Artificial Sequence: Synthetic oligonucleotide"
cuccagagaaguuucuacg

SEQ ID NO: 619 - RNA, 19 nt, Artificial Sequence
  source: /note="Description of Artificial Sequence: Synthetic oligonucleotide"
ugaaguccgagcuaacuga

SEQ ID NO: 620 - RNA, 19 nt, Artificial Sequence
  source: /note="Description of Artificial Sequence: Synthetic oligonucleotide"
guccgagcuaacugaaguu

SEQ ID NO: 621 - RNA, 19 nt, Artificial Sequence
  source: /note="Description of Artificial Sequence: Synthetic oligonucleotide"
uccgagcuaacugaaguuc

SEQ ID NO: 622 - RNA, 19 nt, Artificial Sequence
  source: /note="Description of Artificial Sequence: Synthetic oligonucleotide"
ccgagcuaacugaaguucc

SEQ ID NO: 623 - RNA, 19 nt, Artificial Sequence
  source: /note="Description of Artificial Sequence: Synthetic oligonucleotide"
cgagcuaacugaaguuccu

SEQ ID NO: 624 - RNA, 19 nt, Artificial Sequence
  source: /note="Description of Artificial Sequence: Synthetic oligonucleotide"
gagcuaacugaaguuccug

SEQ ID NO: 625 - RNA, 19 nt, Artificial Sequence
  source: /note="Description of Artificial Sequence: Synthetic oligonucleotide"
agcuaacugaaguuccugc

SEQ ID NO: 626 - RNA, 19 nt, Artificial Sequence
  source: /note="Description of Artificial Sequence: Synthetic oligonucleotide"
gcuaacugaaguuccugcu

SEQ ID NO: 627 - RNA, 19 nt, Artificial Sequence
  source: /note="Description of Artificial Sequence: Synthetic oligonucleotide"
guuccugcuucccgaauuu

SEQ ID NO: 628 - RNA, 19 nt, Artificial Sequence
  source: /note="Description of Artificial Sequence: Synthetic oligonucleotide"
uuccugcuucccgaauuuu

SEQ ID NO: 629 - RNA, 19 nt, Artificial Sequence
  source: /note="Description of Artificial Sequence: Synthetic oligonucleotide"
uccugcuucccgaauuuug

SEQ ID NO: 630 - RNA, 19 nt, Artificial Sequence
  source: /note="Description of Artificial Sequence: Synthetic oligonucleotide"
ccugcuucccgaauuuuga

SEQ ID NO: 631 - RNA, 19 nt, Artificial Sequence
  source: /note="Description of Artificial Sequence: Synthetic oligonucleotide"
cugcuucccgaauuuugaa

SEQ ID NO: 632 - RNA, 19 nt, Artificial Sequence
  source: /note="Description of Artificial Sequence: Synthetic oligonucleotide"
ugcuucccgaauuuugaag

SEQ ID NO: 633 - RNA, 19 nt, Artificial Sequence
  source: /note="Description of Artificial Sequence: Synthetic oligonucleotide"
gcuucccgaauuuugaagg

SEQ ID NO: 634 - RNA, 19 nt, Artificial Sequence
  source: /note="Description of Artificial Sequence: Synthetic oligonucleotide"
cuucccgaauuuugaagga

SEQ ID NO: 635 - RNA, 19 nt, Artificial Sequence
  source: /note="Description of Artificial Sequence: Synthetic oligonucleotide"
uucccgaauuuugaaggag

SEQ ID NO: 636 - RNA, 19 nt, Artificial Sequence
  source: /note="Description of Artificial Sequence: Synthetic oligonucleotide"
ucccgaauuuugaaggaga

SEQ ID NO: 637 - RNA, 19 nt, Artificial Sequence
  source: /note="Description of Artificial Sequence: Synthetic oligonucleotide"
cccgaauuuugaaggagag

SEQ ID NO: 638 - RNA, 19 nt, Artificial Sequence
  source: /note="Description of Artificial Sequence: Synthetic oligonucleotide"
cggauguggagaacuaguu

SEQ ID NO: 639 - RNA, 19 nt, Artificial Sequence
  source: /note="Description of Artificial Sequence: Synthetic oligonucleotide"
ggauguggagaacuaguuu

SEQ ID NO: 640 - RNA, 19 nt, Artificial Sequence
  source: /note="Description of Artificial Sequence: Synthetic oligonucleotide"
gauguggagaacuaguuug

SEQ ID NO: 641 - RNA, 19 nt, Artificial Sequence
  source: /note="Description of Artificial Sequence: Synthetic oligonucleotide"
auguggagaacuaguuugg

SEQ ID NO: 642 - RNA, 19 nt, Artificial Sequence
  source: /note="Description of Artificial Sequence: Synthetic oligonucleotide"
uguggagaacuaguuuggg

SEQ ID NO: 643 - RNA, 19 nt, Artificial Sequence
  source: /note="Description of Artificial Sequence: Synthetic oligonucleotide"
guggagaacuaguuugggu

SEQ ID NO: 644 - RNA, 19 nt, Artificial Sequence
  source: /note="Description of Artificial Sequence: Synthetic oligonucleotide"
uggagaacuaguuugggua

SEQ ID NO: 645 - RNA, 19 nt, Artificial Sequence
  source: /note="Description of Artificial Sequence: Synthetic oligonucleotide"
ggagaacuaguuuggguag

SEQ ID NO: 646 - RNA, 19 nt, Artificial Sequence
  source: /note="Description of Artificial Sequence: Synthetic oligonucleotide"
gagaacuaguuuggguagg

SEQ ID NO: 647 - RNA, 19 nt, Artificial Sequence
  source: /note="Description of Artificial Sequence: Synthetic oligonucleotide"
acgcugagaacagcagaaa

SEQ ID NO: 648 - RNA, 19 nt, Artificial Sequence
  source: /note="Description of Artificial Sequence: Synthetic oligonucleotide"
gcugagaacagcagaaaca

SEQ ID NO: 649 - RNA, 19 nt, Artificial Sequence
  source: /note="Description of Artificial Sequence: Synthetic oligonucleotide"
cugagaacagcagaaacaa

SEQ ID NO: 650 - RNA, 19 nt, Artificial Sequence
  source: /note="Description of Artificial Sequence: Synthetic oligonucleotide"
ugagaacagcagaaacaau

SEQ ID NO: 651 - RNA, 19 nt, Artificial Sequence
  source: /note="Description of Artificial Sequence: Synthetic oligonucleotide"
gagaacagcagaaacaauu

SEQ ID NO: 652 - RNA, 19 nt, Artificial Sequence
  source: /note="Description of Artificial Sequence: Synthetic oligonucleotide"
agaacagcagaaacaauua

SEQ ID NO: 653 - RNA, 19 nt, Artificial Sequence
  source: /note="Description of Artificial Sequence: Synthetic oligonucleotide"
gaacagcagaaacaauuac

SEQ ID NO: 654 - RNA, 19 nt, Artificial Sequence
  source: /note="Description of Artificial Sequence: Synthetic oligonucleotide"
aacagcagaaacaauuacu

SEQ ID NO: 655 - RNA, 19 nt, Artificial Sequence
  source: /note="Description of Artificial Sequence: Synthetic oligonucleotide"
acagcagaaacaauuacug

SEQ ID NO: 656 - RNA, 19 nt, Artificial Sequence
  source: /note="Description of Artificial Sequence: Synthetic oligonucleotide"
cagcagaaacaauuacugg

SEQ ID NO: 657 - RNA, 19 nt, Artificial Sequence
  source: /note="Description of Artificial Sequence: Synthetic oligonucleotide"
agcagaaacaauuacuggc

SEQ ID NO: 658 - RNA, 19 nt, Artificial Sequence
  source: /note="Description of Artificial Sequence: Synthetic oligonucleotide"
gcagaaacaauuacuggca

SEQ ID NO: 659 - RNA, 19 nt, Artificial Sequence
  source: /note="Description of Artificial Sequence: Synthetic oligonucleotide"
cagaaacaauuacuggcaa

SEQ ID NO: 660 - RNA, 19 nt, Artificial Sequence
  source: /note="Description of Artificial Sequence: Synthetic oligonucleotide"
agaaacaauuacuggcaag

SEQ ID NO: 661 - RNA, 19 nt, Artificial Sequence
  source: /note="Description of Artificial Sequence: Synthetic oligonucleotide"
gaaacaauuacuggcaagu

SEQ ID NO: 662 - RNA, 19 nt, Artificial Sequence
  source: /note="Description of Artificial Sequence: Synthetic oligonucleotide"
aacaauuacuggcaaguau

SEQ ID NO: 663 - RNA, 19 nt, Artificial Sequence
  source: /note="Description of Artificial Sequence: Synthetic oligonucleotide"
acaauuacuggcaaguaug

SEQ ID NO: 664 - RNA, 19 nt, Artificial Sequence
  source: /note="Description of Artificial Sequence: Synthetic oligonucleotide"
caauuacuggcaaguaugg

SEQ ID NO: 665 - RNA, 19 nt, Artificial Sequence
  source: /note="Description of Artificial Sequence: Synthetic oligonucleotide"
aauuacuggcaaguauggu

SEQ ID NO: 666 - RNA, 19 nt, Artificial Sequence
  source: /note="Description of Artificial Sequence: Synthetic oligonucleotide"
uacuggcaaguauggugug

SEQ ID NO: 667 - RNA, 19 nt, Artificial Sequence
  source: /note="Description of Artificial Sequence: Synthetic oligonucleotide"
auguccgccagguuuuuga

SEQ ID NO: 668 - RNA, 19 nt, Artificial Sequence
  source: /note="Description of Artificial Sequence: Synthetic oligonucleotide"
uguccgccagguuuuugag

SEQ ID NO: 669 - RNA, 19 nt, Artificial Sequence
  source: /note="Description of Artificial Sequence: Synthetic oligonucleotide"
guccgccagguuuuugagu

SEQ ID NO: 670 - RNA, 19 nt, Artificial Sequence
  source: /note="Description of Artificial Sequence: Synthetic oligonucleotide"
uccgccagguuuuugagua

SEQ ID NO: 671 - RNA, 19 nt, Artificial Sequence
  source: /note="Description of Artificial Sequence: Synthetic oligonucleotide"
ccgccagguuuuugaguau

SEQ ID NO: 672 - RNA, 19 nt, Artificial Sequence
  source: /note="Description of Artificial Sequence: Synthetic oligonucleotide"
cgccagguuuuugaguaug

SEQ ID NO: 673 - RNA, 19 nt, Artificial Sequence
  source: /note="Description of Artificial Sequence: Synthetic oligonucleotide"
gccagguuuuugaguauga

SEQ ID NO: 674 - RNA, 19 nt, Artificial Sequence
  source: /note="Description of Artificial Sequence: Synthetic oligonucleotide"
ccagguuuuugaguaugac

SEQ ID NO: 675 - RNA, 19 nt, Artificial Sequence
  source: /note="Description of Artificial Sequence: Synthetic oligonucleotide"
cagguuuuugaguaugacc

SEQ ID NO: 676 - RNA, 19 nt, Artificial Sequence
  source: /note="Description of Artificial Sequence: Synthetic oligonucleotide"
agguuuuugaguaugaccu

SEQ ID NO: 677 - RNA, 19 nt, Artificial Sequence
  source: /note="Description of Artificial Sequence: Synthetic oligonucleotide"
gguuuuugaguaugaccuc

SEQ ID NO: 678 - RNA, 19 nt, Artificial Sequence
  source: /note="Description of Artificial Sequence: Synthetic oligonucleotide"
guuuuugaguaugaccuca

SEQ ID NO: 679 - RNA, 19 nt, Artificial Sequence
  source: /note="Description of Artificial Sequence: Synthetic oligonucleotide"
gaccucaucagccaguuua

SEQ ID NO: 680 - RNA, 19 nt, Artificial Sequence
  source: /note="Description of Artificial Sequence: Synthetic oligonucleotide"
accucaucagccaguuuau

SEQ ID NO: 681 - RNA, 19 nt, Artificial Sequence
  source: /note="Description of Artificial Sequence: Synthetic oligonucleotide"
ccucaucagccaguuuaug

SEQ ID NO: 682 - RNA, 19 nt, Artificial Sequence
  source: /note="Description of Artificial Sequence: Synthetic oligonucleotide"
cucaucagccaguuuaugc

SEQ ID NO: 683 - RNA, 19 nt, Artificial Sequence
  source: /note="Description of Artificial Sequence: Synthetic oligonucleotide"
ucaucagccaguuuaugca

SEQ ID NO: 684 - RNA, 19 nt, Artificial Sequence
  source: /note="Description of Artificial Sequence: Synthetic oligonucleotide"
ucagccaguuuaugcaggg

SEQ ID NO: 685 - RNA, 19 nt, Artificial Sequence
  source: /note="Description of Artificial Sequence: Synthetic oligonucleotide"
ggcuacccuucuaagguuc

SEQ ID NO: 686 - RNA, 19 nt, Artificial Sequence
  source: /note="Description of Artificial Sequence: Synthetic oligonucleotide"
gcuacccuucuaagguuca

SEQ ID NO: 687 - RNA, 19 nt, Artificial Sequence
  source: /note="Description of Artificial Sequence: Synthetic oligonucleotide"
cuacccuucuaagguucac

SEQ ID NO: 688 - RNA, 19 nt, Artificial Sequence
  source: /note="Description of Artificial Sequence: Synthetic oligonucleotide"
uacccuucuaagguucaca

SEQ ID NO: 689 - RNA, 19 nt, Artificial Sequence
  source: /note="Description of Artificial Sequence: Synthetic oligonucleotide"
acccuucuaagguucacau

SEQ ID NO: 690 - RNA, 19 nt, Artificial Sequence
  source: /note="Description of Artificial Sequence: Synthetic oligonucleotide"
cccuucuaagguucacaua

SEQ ID NO: 691 - RNA, 19 nt, Artificial Sequence
  source: /note="Description of Artificial Sequence: Synthetic oligonucleotide"
ccuucuaagguucacauac

SEQ ID NO: 692 - RNA, 19 nt, Artificial Sequence
  source: /note="Description of Artificial Sequence: Synthetic oligonucleotide"
cuucuaagguucacauacu

SEQ ID NO: 693 - RNA, 19 nt, Artificial Sequence
  source: /note="Description of Artificial Sequence: Synthetic oligonucleotide"
uucuaagguucacauacug

SEQ ID NO: 694 - RNA, 19 nt, Artificial Sequence
  source: /note="Description of Artificial Sequence: Synthetic oligonucleotide"
cuaagguucacauacugcc

SEQ ID NO: 695 - RNA, 19 nt, Artificial Sequence
  source: /note="Description of Artificial Sequence: Synthetic oligonucleotide"
uaagguucacauacugccu

SEQ ID NO: 696 - RNA, 19 nt, Artificial Sequence
  source: /note="Description of Artificial Sequence: Synthetic oligonucleotide"
gaguccagaacugucauaa

SEQ ID NO: 697 - RNA, 19 nt, Artificial Sequence
  source: /note="Description of Artificial Sequence: Synthetic oligonucleotide"
aguccagaacugucauaag

SEQ ID NO: 698 - RNA, 19 nt, Artificial Sequence
  source: /note="Description of Artificial Sequence: Synthetic oligonucleotide"
guccagaacugucauaaga

SEQ ID NO: 699 - RNA, 19 nt, Artificial Sequence
  source: /note="Description of Artificial Sequence: Synthetic oligonucleotide"
uccagaacugucauaagau

SEQ ID NO: 700 - RNA, 19 nt, Artificial Sequence
  source: /note="Description of Artificial Sequence: Synthetic oligonucleotide"
ccagaacugucauaagaua

SEQ ID NO: 701 - RNA, 19 nt, Artificial Sequence
  source: /note="Description of Artificial Sequence: Synthetic oligonucleotide"
cagaacugucauaagauau

SEQ ID NO: 702 - RNA, 19 nt, Artificial Sequence
  source: /note="Description of Artificial Sequence: Synthetic oligonucleotide"
agaacugucauaagauaug

SEQ ID NO: 703 - RNA, 19 nt, Artificial Sequence
  source: /note="Description of Artificial Sequence: Synthetic oligonucleotide"
gaacugucauaagauauga

SEQ ID NO: 704 - RNA, 19 nt, Artificial Sequence
  source: /note="Description of Artificial Sequence: Synthetic oligonucleotide"
aacugucauaagauaugag

SEQ ID NO: 705 - RNA, 19 nt, Artificial Sequence
  source: /note="Description of Artificial Sequence: Synthetic oligonucleotide"
acugucauaagauaugagc

SEQ ID NO: 706 - RNA, 19 nt, Artificial Sequence
  source: /note="Description of Artificial Sequence: Synthetic oligonucleotide"
cugucauaagauaugagcu

SEQ ID NO: 707 - RNA, 19 nt, Artificial Sequence
  source: /note="Description of Artificial Sequence: Synthetic oligonucleotide"
ugucauaagauaugagcug

SEQ ID NO: 708 - RNA, 19 nt, Artificial Sequence
  source: /note="Description of Artificial Sequence: Synthetic oligonucleotide"
gucauaagauaugagcuga

SEQ ID NO: 709 - RNA, 19 nt, Artificial Sequence
  source: /note="Description of Artificial Sequence: Synthetic oligonucleotide"
aagauaugagcugaauacc

SEQ ID NO: 710 - RNA, 19 nt, Artificial Sequence
  source: /note="Description of Artificial Sequence: Synthetic oligonucleotide"
ugaauaccgagacagugaa

SEQ ID NO: 711 - RNA, 19 nt, Artificial Sequence
  source: /note="Description of Artificial Sequence: Synthetic oligonucleotide"
ugaaggcugagaaggaaau

SEQ ID NO: 712 - RNA, 19 nt, Artificial Sequence
  source: /note="Description of Artificial Sequence: Synthetic oligonucleotide"
ggcugagaaggaaaucccu

SEQ ID NO: 713 - RNA, 19 nt, Artificial Sequence
  source: /note="Description of Artificial Sequence: Synthetic oligonucleotide"
cggacaguucccguauucu

SEQ ID NO: 714 - RNA, 19 nt, Artificial Sequence
  source: /note="Description of Artificial Sequence: Synthetic oligonucleotide"
ggacaguucccguauucuu

SEQ ID NO: 715 - RNA, 19 nt, Artificial Sequence
  source: /note="Description of Artificial Sequence: Synthetic oligonucleotide"
gacaguucccguauucuug

SEQ ID NO: 716 - RNA, 19 nt, Artificial Sequence
  source: /note="Description of Artificial Sequence: Synthetic oligonucleotide"
acaguucccguauucuugg

SEQ ID NO: 717 - RNA, 19 nt, Artificial Sequence
  source: /note="Description of Artificial Sequence: Synthetic oligonucleotide"
gccucugggucauuuacag

SEQ ID NO: 718 - RNA, 19 nt, Artificial Sequence
  source: /note="Description of Artificial Sequence: Synthetic oligonucleotide"
ccauuguccucuccaaacu

SEQ ID NO: 719 - RNA, 19 nt, Artificial Sequence
  source: /note="Description of Artificial Sequence: Synthetic oligonucleotide"
cauuguccucuccaaacug

SEQ ID NO: 720 - RNA, 19 nt, Artificial Sequence
  source: /note="Description of Artificial Sequence: Synthetic oligonucleotide"
auuguccucuccaaacuga

SEQ ID NO: 721 - RNA, 19 nt, Artificial Sequence
  source: /note="Description of Artificial Sequence: Synthetic oligonucleotide"
uuguccucuccaaacugaa

SEQ ID NO: 722 - RNA, 19 nt, Artificial Sequence
  source: /note="Description of Artificial Sequence: Synthetic oligonucleotide"
ucuccaaacugaacccaga

SEQ ID NO: 723 - RNA, 19 nt, Artificial Sequence
  source: /note="Description of Artificial Sequence: Synthetic oligonucleotide"
caaacugaacccagagaau

SEQ ID NO: 724 - RNA, 19 nt, Artificial Sequence
  source: /note="Description of Artificial Sequence: Synthetic oligonucleotide"
aaacugaacccagagaauc

SEQ ID NO: 725 - RNA, 19 nt, Artificial Sequence
  source: /note="Description of Artificial Sequence: Synthetic oligonucleotide"
cccagagaaucuggaacuc

SEQ ID NO: 726 - RNA, 19 nt, Artificial Sequence
  source: /note="Description of Artificial Sequence: Synthetic oligonucleotide"
gucgccaaugccuucauca

SEQ ID NO: 727 - RNA, 19 nt, Artificial Sequence
  source: /note="Description of Artificial Sequence: Synthetic oligonucleotide"
ccaaugccuucaucaucug

SEQ ID NO: 728 - RNA, 19 nt, Artificial Sequence
  source: /note="Description of Artificial Sequence: Synthetic oligonucleotide"
aaugccuucaucaucugug

SEQ ID NO: 729 - RNA, 19 nt, Artificial Sequence
  source: /note="Description of Artificial Sequence: Synthetic oligonucleotide"
augccuucaucaucugugg

SEQ ID NO: 730 - RNA, 19 nt, Artificial Sequence
  source: /note="Description of Artificial Sequence: Synthetic oligonucleotide"
guggcaccuuguacaccgu

SEQ ID NO: 731 - RNA, 19 nt, Artificial Sequence
  source: /note="Description of Artificial Sequence: Synthetic oligonucleotide"
accgucaacuuugcuuaug

SEQ ID NO: 732 - RNA, 19 nt, Artificial Sequence
  source: /note="Description of Artificial Sequence: Synthetic oligonucleotide"
ccgucaacuuugcuuauga

SEQ ID NO: 733 - RNA, 19 nt, Artificial Sequence
  source: /note="Description of Artificial Sequence: Synthetic oligonucleotide"
cgucaacuuugcuuaugac

SEQ ID NO: 734 - RNA, 19 nt, Artificial Sequence
  source: /note="Description of Artificial Sequence: Synthetic oligonucleotide"
gucaacuuugcuuaugaca

SEQ ID NO: 735 - RNA, 19 nt, Artificial Sequence
  source: /note="Description of Artificial Sequence: Synthetic oligonucleotide"
ucaacuuugcuuaugacac

SEQ ID NO: 736 - RNA, 19 nt, Artificial Sequence
  source: /note="Description of Artificial Sequence: Synthetic oligonucleotide"
cccugaccaucccauucaa

SEQ ID NO: 737 - RNA, 19 nt, Artificial Sequence
  source: /note="Description of Artificial Sequence: Synthetic oligonucleotide"
ccugaccaucccauucaag

SEQ ID NO: 738 - RNA, 19 nt, Artificial Sequence
  source: /note="Description of Artificial Sequence: Synthetic oligonucleotide"
cugaccaucccauucaaga

SEQ ID NO: 739 - RNA, 19 nt, Artificial Sequence
  source: /note="Description of Artificial Sequence: Synthetic oligonucleotide"
ccaucccauucaagaaccg

SEQ ID NO: 740 - RNA, 19 nt, Artificial Sequence
  source: /note="Description of Artificial Sequence: Synthetic oligonucleotide"
aucccauucaagaaccgcu

SEQ ID NO: 741 - RNA, 19 nt, Artificial Sequence
  source: /note="Description of Artificial Sequence: Synthetic oligonucleotide"
ucccauucaagaaccgcua

SEQ ID NO: 742 - RNA, 19 nt, Artificial Sequence
  source: /note="Description of Artificial Sequence: Synthetic oligonucleotide"
cccauucaagaaccgcuau

SEQ ID NO: 743 - RNA, 19 nt, Artificial Sequence
  source: /note="Description of Artificial Sequence: Synthetic oligonucleotide"
aaguacagcagcaugauug

SEQ ID NO: 744 - RNA, 19 nt, Artificial Sequence
  source: /note="Description of Artificial Sequence: Synthetic oligonucleotide"
aguacagcagcaugauuga

SEQ ID NO: 745 - RNA, 19 nt, Artificial Sequence
  source: /note="Description of Artificial Sequence: Synthetic oligonucleotide"
acagcagcaugauugacua

SEQ ID NO: 746 - RNA, 19 nt, Artificial Sequence
  source: /note="Description of Artificial Sequence: Synthetic oligonucleotide"
cagcagcaugauugacuac

SEQ ID NO: 747 - RNA, 19 nt, Artificial Sequence
  source: /note="Description of Artificial Sequence: Synthetic oligonucleotide"
agcagcaugauugacuaca

SEQ ID NO: 748 - RNA, 19 nt, Artificial Sequence
  source: /note="Description of Artificial Sequence: Synthetic oligonucleotide"
gcagcaugauugacuacaa

SEQ ID NO: 749 - RNA, 19 nt, Artificial Sequence
  source: /note="Description of Artificial Sequence: Synthetic oligonucleotide"
cagcaugauugacuacaac

SEQ ID NO: 750 - RNA, 19 nt, Artificial Sequence
  source: /note="Description of Artificial Sequence: Synthetic oligonucleotide"
agcaugauugacuacaacc

SEQ ID NO: 751 - RNA, 19 nt, Artificial Sequence
  source: /note="Description of Artificial Sequence: Synthetic oligonucleotide"
gcaugauugacuacaaccc

SEQ ID NO: 752 - RNA, 19 nt, Artificial Sequence
  source: /note="Description of Artificial Sequence: Synthetic oligonucleotide"
ucuuugccugggacaacuu

SEQ ID NO: 753 - RNA, 19 nt, Artificial Sequence
  source: /note="Description of Artificial Sequence: Synthetic oligonucleotide"
uugccugggacaacuugaa

SEQ ID NO: 754 - RNA, 19 nt, Artificial Sequence
  source: /note="Description of Artificial Sequence: Synthetic oligonucleotide"
ccugggacaacuugaacau

SEQ ID NO: 755 - RNA, 19 nt, Artificial Sequence
  source: /note="Description of Artificial Sequence: Synthetic oligonucleotide"
cugggacaacuugaacaug

SEQ ID NO: 756 - RNA, 19 nt, Artificial Sequence
  source: /note="Description of Artificial Sequence: Synthetic oligonucleotide"
ugggacaacuugaacaugg

SEQ ID NO: 757 - RNA, 19 nt, Artificial Sequence
  source: /note="Description of Artificial Sequence: Synthetic oligonucleotide"
gggacaacuugaacauggu

SEQ ID NO: 758 - RNA, 19 nt, Artificial Sequence
  source: /note="Description of Artificial Sequence: Synthetic oligonucleotide"
ggacaacuugaacaugguc

SEQ ID NO: 759 - RNA, 19 nt, Artificial Sequence
  source: /note="Description of Artificial Sequence: Synthetic oligonucleotide"
gacaacuugaacaugguca

SEQ ID NO: 760 - RNA, 19 nt, Artificial Sequence
  source: /note="Description of Artificial Sequence: Synthetic oligonucleotide"
acaacuugaacauggucac

SEQ ID NO: 761 - RNA, 19 nt, Artificial Sequence
  source: /note="Description of Artificial Sequence: Synthetic oligonucleotide"
caacuugaacauggucacu

SEQ ID NO: 762 - RNA, 19 nt, Artificial Sequence
  source: /note="Description of Artificial Sequence: Synthetic oligonucleotide"
acuugaacauggucacuua

SEQ ID NO: 763 - RNA, 19 nt, Artificial Sequence
  source: /note="Description of Artificial Sequence: Synthetic oligonucleotide"
cuugaacauggucacuuau

SEQ ID NO: 764 - RNA, 19 nt, Artificial Sequence
  source: /note="Description of Artificial Sequence: Synthetic oligonucleotide"
uugaacauggucacuuaug

SEQ ID NO: 765 - RNA, 19 nt, Artificial Sequence
  source: /note="Description of Artificial Sequence: Synthetic oligonucleotide"
ugaacauggucacuuauga

SEQ ID NO: 766 - RNA, 19 nt, Artificial Sequence
  source: /note="Description of Artificial Sequence: Synthetic oligonucleotide"
gaacauggucacuuaugac

SEQ ID NO: 767 - RNA, 19 nt, Artificial Sequence
  source: /note="Description of Artificial Sequence: Synthetic oligonucleotide"
aacauggucacuuaugaca

SEQ ID NO: 768 - RNA, 19 nt, Artificial Sequence
  source: /note="Description of Artificial Sequence: Synthetic oligonucleotide"
acauggucacuuaugacau

SEQ ID NO: 769 - RNA, 19 nt, Artificial Sequence
  source: /note="Description of Artificial Sequence: Synthetic oligonucleotide"
cauggucacuuaugacauc

SEQ ID NO: 770 - RNA, 19 nt, Artificial Sequence
  source: /note="Description of Artificial Sequence: Synthetic oligonucleotide"
uggucacuuaugacaucaa

SEQ ID NO: 771 - RNA, 19 nt, Artificial Sequence
  source: /note="Description of Artificial Sequence: Synthetic oligonucleotide"
ggucacuuaugacaucaag

SEQ ID NO: 772 - RNA, 19 nt, Artificial Sequence
  source: /note="Description of Artificial Sequence: Synthetic oligonucleotide"
gucacuuaugacaucaagc

SEQ ID NO: 773 - RNA, 19 nt, Artificial Sequence
  source: /note="Description of Artificial Sequence: Synthetic oligonucleotide"
acaucaagcucuccaagau

SEQ ID NO: 774 - RNA, 19 nt, Artificial Sequence
  source: /note="Description of Artificial Sequence: Synthetic oligonucleotide"
aucaagcucuccaagaugu

SEQ ID NO: 775 - RNA, 19 nt, Artificial Sequence
  source: /note="Description of Artificial Sequence: Synthetic oligonucleotide"
ucaagcucuccaagaugug

SEQ ID NO: 776 - RNA, 19 nt, Artificial Sequence
  source: /note="Description of Artificial Sequence: Synthetic oligonucleotide"
agcucuccaagaugugaaa

SEQ ID NO: 777 - RNA, 19 nt, Artificial Sequence
  source: /note="Description of Artificial Sequence: Synthetic oligonucleotide"
gcucuccaagaugugaaaa

SEQ ID NO: 778 - RNA, 19 nt, Artificial Sequence
  source: /note="Description of Artificial Sequence: Synthetic oligonucleotide"
cucuccaagaugugaaaag

SEQ ID NO: 779 - RNA, 19 nt, Artificial Sequence
  source: /note="Description of Artificial Sequence: Synthetic oligonucleotide"
ucuccaagaugugaaaagc

SEQ ID NO: 780 - RNA, 19 nt, Artificial Sequence
  source: /note="Description of Artificial Sequence: Synthetic oligonucleotide"
uccaagaugugaaaagccu

SEQ ID NO: 781 - RNA, 19 nt, Artificial Sequence
  source: /note="Description of Artificial Sequence: Synthetic oligonucleotide"
ccaagaugugaaaagccuc

SEQ ID NO: 782 - RNA, 19 nt, Artificial Sequence
  source: /note="Description of Artificial Sequence: Synthetic oligonucleotide"
ggaugaacauggucaccau

SEQ ID NO: 783 - RNA, 19 nt, Artificial Sequence
  source: /note="Description of Artificial Sequence: Synthetic oligonucleotide"
caggaauuguagucugagg

SEQ ID NO: 784 - RNA, 19 nt, Artificial Sequence
  source: /note="Description of Artificial Sequence: Synthetic oligonucleotide"
aggaauuguagucugaggg

SEQ ID NO: 785 - RNA, 19 nt, Artificial Sequence
  source: /note="Description of Artificial Sequence: Synthetic oligonucleotide"
ucuucugucagcauuuaug

SEQ ID NO: 786 - RNA, 19 nt, Artificial Sequence
  source: /note="Description of Artificial Sequence: Synthetic oligonucleotide"
cuucugucagcauuuaugg

SEQ ID NO: 787 - RNA, 19 nt, Artificial Sequence
  source: /note="Description of Artificial Sequence: Synthetic oligonucleotide"
uucugucagcauuuauggg

SEQ ID NO: 788 - RNA, 19 nt, Artificial Sequence
  source: /note="Description of Artificial Sequence: Synthetic oligonucleotide"
cugucagcauuuaugggau

SEQ ID NO: 789 - RNA, 19 nt, Artificial Sequence
  source: /note="Description of Artificial Sequence: Synthetic oligonucleotide"
ugucagcauuuaugggaug

SEQ ID NO: 790 - RNA, 19 nt, Artificial Sequence
  source: /note="Description of Artificial Sequence: Synthetic oligonucleotide"
gucagcauuuaugggaugu

SEQ ID NO: 791 - RNA, 19 nt, Artificial Sequence
  source: /note="Description of Artificial Sequence: Synthetic oligonucleotide"
ucagcauuuaugggauguu

SEQ ID NO: 792 - RNA, 19 nt, Artificial Sequence
  source: /note="Description of Artificial Sequence: Synthetic oligonucleotide"
cagcauuuaugggauguuu

SEQ ID NO: 793 - RNA, 19 nt, Artificial Sequence
  source: /note="Description of Artificial Sequence: Synthetic oligonucleotide"
agcauuuaugggauguuua

SEQ ID NO: 794 - RNA, 19 nt, Artificial Sequence
  source: /note="Description of Artificial Sequence: Synthetic oligonucleotide"
gcauuuaugggauguuuaa

SEQ ID NO: 795 - RNA, 19 nt, Artificial Sequence
  source: /note="Description of Artificial Sequence: Synthetic oligonucleotide"
cauuuaugggauguuuaau

SEQ ID NO: 796 - RNA, 19 nt, Artificial Sequence
  source: /note="Description of Artificial Sequence: Synthetic oligonucleotide"
auuuaugggauguuuaaug

SEQ ID NO: 797 - RNA, 19 nt, Artificial Sequence
  source: /note="Description of Artificial Sequence: Synthetic oligonucleotide"
uuuaugggauguuuaauga

SEQ ID NO: 798 - RNA, 19 nt, Artificial Sequence
  source: /note="Description of Artificial Sequence: Synthetic oligonucleotide"
uuaugggauguuuaaugac

SEQ ID NO: 799 - RNA, 19 nt, Artificial Sequence
  source: /note="Description of Artificial Sequence: Synthetic oligonucleotide"
augggauguuuaaugacau

SEQ ID NO: 800 - RNA, 19 nt, Artificial Sequence
  source: /note="Description of Artificial Sequence: Synthetic oligonucleotide"
ugggauguuuaaugacaua

SEQ ID NO: 801 - RNA, 19 nt, Artificial Sequence
  source: /note="Description of Artificial Sequence: Synthetic oligonucleotide"
gggauguuuaaugacauag

SEQ ID NO: 802 - RNA, 19 nt, Artificial Sequence
  source: /note="Description of Artificial Sequence: Synthetic oligonucleotide"
ggauguuuaaugacauagu

SEQ ID NO: 803 - RNA, 19 nt, Artificial Sequence
  source: /note="Description of Artificial Sequence: Synthetic oligonucleotide"
gauguuuaaugacauaguu

SEQ ID NO: 804 - RNA, 19 nt, Artificial Sequence
  source: /note="Description of Artificial Sequence: Synthetic oligonucleotide"
auguuuaaugacauaguuc

SEQ ID NO: 805 - RNA, 19 nt, Artificial Sequence
  source: /note="Description of Artificial Sequence: Synthetic oligonucleotide"
uguuuaaugacauaguuca

SEQ ID NO: 806 - RNA, 19 nt, Artificial Sequence
  source: /note="Description of Artificial Sequence: Synthetic oligonucleotide"
guuuaaugacauaguucaa

SEQ ID NO: 807 - RNA, 19 nt, Artificial Sequence
  source: /note="Description of Artificial Sequence: Synthetic oligonucleotide"
uuuaaugacauaguucaag

SEQ ID NO: 808 - RNA, 19 nt, Artificial Sequence
  source: /note="Description of Artificial Sequence: Synthetic oligonucleotide"
uuaaugacauaguucaagu

SEQ ID NO: 809 - RNA, 19 nt, Artificial Sequence
  source: /note="Description of Artificial Sequence: Synthetic oligonucleotide"
uaaugacauaguucaaguu

SEQ ID NO: 810 - RNA, 19 nt, Artificial Sequence
  source: /note="Description of Artificial Sequence: Synthetic oligonucleotide"
aaugacauaguucaaguuu

SEQ ID NO: 811 - RNA, 19 nt, Artificial Sequence
  source: /note="Description of Artificial Sequence: Synthetic oligonucleotide"
augacauaguucaaguuuu

SEQ ID NO: 812 - RNA, 19 nt, Artificial Sequence
  source: /note="Description of Artificial Sequence: Synthetic oligonucleotide"
ugacauaguucaaguuuuc

SEQ ID NO: 813 - RNA, 19 nt, Artificial Sequence
  source: /note="Description of Artificial Sequence: Synthetic oligonucleotide"
gacauaguucaaguuuucu

SEQ ID NO: 814 - RNA, 19 nt, Artificial Sequence
  source: /note="Description of Artificial Sequence: Synthetic oligonucleotide"
acauaguucaaguuuucuu

SEQ ID NO: 815 - RNA, 19 nt, Artificial Sequence
  source: /note="Description of Artificial Sequence: Synthetic oligonucleotide"
cauaguucaaguuuucuug

SEQ ID NO: 816 - RNA, 19 nt, Artificial Sequence
  source: /note="Description of Artificial Sequence: Synthetic oligonucleotide"
auaguucaaguuuucuugu

SEQ ID NO: 817 - RNA, 19 nt, Artificial Sequence
  source: /note="Description of Artificial Sequence: Synthetic oligonucleotide"
uaguucaaguuuucuugug

SEQ ID NO: 818 - RNA, 19 nt, Artificial Sequence
  source: /note="Description of Artificial Sequence: Synthetic oligonucleotide"
aguucaaguuuucuuguga

SEQ ID NO: 819 - RNA, 19 nt, Artificial Sequence
  source: /note="Description of Artificial Sequence: Synthetic oligonucleotide"
guucaaguuuucuugugau

SEQ ID NO: 820 - RNA, 19 nt, Artificial Sequence
  source: /note="Description of Artificial Sequence: Synthetic oligonucleotide"
uucaaguuuucuugugauu

SEQ ID NO: 821 - RNA, 19 nt, Artificial Sequence
  source: /note="Description of Artificial Sequence: Synthetic oligonucleotide"
ucaaguuuucuugugauuu

SEQ ID NO: 822 - RNA, 19 nt, Artificial Sequence
  source: /note="Description of Artificial Sequence: Synthetic oligonucleotide"
caaguuuucuugugauuug

SEQ ID NO: 823 - RNA, 19 nt, Artificial Sequence
  source: /note="Description of Artificial Sequence: Synthetic oligonucleotide"
aaguuuucuugugauuugg

SEQ ID NO: 824 - RNA, 19 nt, Artificial Sequence
  source: /note="Description of Artificial Sequence: Synthetic oligonucleotide"
aguuuucuugugauuuggg

SEQ ID NO: 825 - RNA, 19 nt, Artificial Sequence
  source: /note="Description of Artificial Sequence: Synthetic oligonucleotide"
guuuucuugugauuugggg

SEQ ID NO: 826 - RNA, 19 nt, Artificial Sequence
  source: /note="Description of Artificial Sequence: Synthetic oligonucleotide"
ugugauuuggggcaaaagc

SEQ ID NO: 827 - RNA, 19 nt, Artificial Sequence
  source: /note="Description of Artificial Sequence: Synthetic oligonucleotide"
gugauuuggggcaaaagcu

SEQ ID NO: 828 - RNA, 19 nt, Artificial Sequence
  source: /note="Description of Artificial Sequence: Synthetic oligonucleotide"
ugauuuggggcaaaagcug

SEQ ID NO: 829 - RNA, 19 nt, Artificial Sequence
  source: /note="Description of Artificial Sequence: Synthetic oligonucleotide"
uaguuucuuccugaaaacc

SEQ ID NO: 830 - RNA, 19 nt, Artificial Sequence
  source: /note="Description of Artificial Sequence: Synthetic oligonucleotide"
aguuucuuccugaaaacca

SEQ ID NO: 831 - RNA, 19 nt, Artificial Sequence
  source: /note="Description of Artificial Sequence: Synthetic oligonucleotide"
guuucuuccugaaaaccau

SEQ ID NO: 832 - RNA, 19 nt, Artificial Sequence
  source: /note="Description of Artificial Sequence: Synthetic oligonucleotide"
uuucuuccugaaaaccauu

SEQ ID NO: 833 - RNA, 19 nt, Artificial Sequence
  source: /note="Description of Artificial Sequence: Synthetic oligonucleotide"
uucuuccugaaaaccauug

SEQ ID NO: 834 - RNA, 19 nt, Artificial Sequence
  source: /note="Description of Artificial Sequence: Synthetic oligonucleotide"
ucuuccugaaaaccauugc

SEQ ID NO: 835 - RNA, 19 nt, Artificial Sequence
  source: /note="Description of Artificial Sequence: Synthetic oligonucleotide"
cuuccugaaaaccauugcu

SEQ ID NO: 836 - RNA, 19 nt, Artificial Sequence
  source: /note="Description of Artificial Sequence: Synthetic oligonucleotide"
uuccugaaaaccauugcuc

SEQ ID NO: 837 - RNA, 19 nt, Artificial Sequence
  source: /note="Description of Artificial Sequence: Synthetic oligonucleotide"
uccugaaaaccauugcucu

SEQ ID NO: 838 - RNA, 19 nt, Artificial Sequence
  source: /note="Description of Artificial Sequence: Synthetic oligonucleotide"
ccugaaaaccauugcucuu

SEQ ID NO: 839 - RNA, 19 nt, Artificial Sequence
  source: /note="Description of Artificial Sequence: Synthetic oligonucleotide"
cugaaaaccauugcucuug

SEQ ID NO: 840 - RNA, 19 nt, Artificial Sequence
  source: /note="Description of Artificial Sequence: Synthetic oligonucleotide"
aaccauugcucuugcaugu

SEQ ID NO: 841 - RNA, 19 nt, Artificial Sequence
  source: /note="Description of Artificial Sequence: Synthetic oligonucleotide"
ccauugcucuugcauguua

SEQ ID NO: 842 - RNA, 19 nt, Artificial Sequence
  source: /note="Description of Artificial Sequence: Synthetic oligonucleotide"
cauugcucuugcauguuac

SEQ ID NO: 843 - RNA, 19 nt, Artificial Sequence
  source: /note="Description of Artificial Sequence: Synthetic oligonucleotide"
auugcucuugcauguuaca

SEQ ID NO: 844 - RNA, 19 nt, Artificial Sequence
  source: /note="Description of Artificial Sequence: Synthetic oligonucleotide"
uugcucuugcauguuacau

SEQ ID NO: 845 - RNA, 19 nt, Artificial Sequence
  source: /note="Description of Artificial Sequence: Synthetic oligonucleotide"
ugcucuugcauguuacaug

SEQ ID NO: 846 - RNA, 19 nt, Artificial Sequence
  source: /note="Description of Artificial Sequence: Synthetic oligonucleotide"
gcucuugcauguuacaugg

SEQ ID NO: 847 - RNA, 19 nt, Artificial Sequence
  source: /note="Description of Artificial Sequence: Synthetic oligonucleotide"
cucuugcauguuacauggu

SEQ ID NO: 848 - RNA, 19 nt, Artificial Sequence
  source: /note="Description of Artificial Sequence: Synthetic oligonucleotide"
ucuugcauguuacaugguu

SEQ ID NO: 849 - RNA, 19 nt, Artificial Sequence
  source: /note="Description of Artificial Sequence: Synthetic oligonucleotide"
cuugcauguuacaugguua

SEQ ID NO: 850 - RNA, 19 nt, Artificial Sequence
  source: /note="Description of Artificial Sequence: Synthetic oligonucleotide"
uugcauguuacaugguuac

SEQ ID NO: 851 - RNA, 19 nt, Artificial Sequence
  source: /note="Description of Artificial Sequence: Synthetic oligonucleotide"
ugcauguuacaugguuacc

SEQ ID NO: 852 - RNA, 19 nt, Artificial Sequence
  source: /note="Description of Artificial Sequence: Synthetic oligonucleotide"
gcauguuacaugguuacca

SEQ ID NO: 853 - RNA, 19 nt, Artificial Sequence
  source: /note="Description of Artificial Sequence: Synthetic oligonucleotide"
auguuacaugguuaccaca

SEQ ID NO: 854 - RNA, 19 nt, Artificial Sequence
  source: /note="Description of Artificial Sequence: Synthetic oligonucleotide"
uguuacaugguuaccacaa

SEQ ID NO: 855 - RNA, 19 nt, Artificial Sequence
  source: /note="Description of Artificial Sequence: Synthetic oligonucleotide"
ugguuaccacaagccacaa

SEQ ID NO: 856 - RNA, 19 nt, Artificial Sequence
  source: /note="Description of Artificial Sequence: Synthetic oligonucleotide"
gguuaccacaagccacaau

SEQ ID NO: 857 - RNA, 19 nt, Artificial Sequence
  source: /note="Description of Artificial Sequence: Synthetic oligonucleotide"
guuaccacaagccacaaua

SEQ ID NO: 858 - RNA, 19 nt, Artificial Sequence
  source: /note="Description of Artificial Sequence: Synthetic oligonucleotide"
aaaagcauaacuucuaaag

SEQ ID NO: 859 - RNA, 19 nt, Artificial Sequence
  source: /note="Description of Artificial Sequence: Synthetic oligonucleotide"
aaagcauaacuucuaaagg

SEQ ID NO: 860 - RNA, 19 nt, Artificial Sequence
  source: /note="Description of Artificial Sequence: Synthetic oligonucleotide"
aagcauaacuucuaaagga

SEQ ID NO: 861 - RNA, 19 nt, Artificial Sequence
  source: /note="Description of Artificial Sequence: Synthetic oligonucleotide"
agcauaacuucuaaaggaa

SEQ ID NO: 862 - RNA, 19 nt, Artificial Sequence
  source: /note="Description of Artificial Sequence: Synthetic oligonucleotide"
gcauaacuucuaaaggaag

SEQ ID NO: 863 - RNA, 19 nt, Artificial Sequence
  source: /note="Description of Artificial Sequence: Synthetic oligonucleotide"
cauaacuucuaaaggaagc

SEQ ID NO: 864 - RNA, 19 nt, Artificial Sequence
  source: /note="Description of Artificial Sequence: Synthetic oligonucleotide"
auaacuucuaaaggaagca

SEQ ID NO: 865 - RNA, 19 nt, Artificial Sequence
  source: /note="Description of Artificial Sequence: Synthetic oligonucleotide"
acuucuaaaggaagcagaa

SEQ ID NO: 866 - RNA, 19 nt, Artificial Sequence
  source: /note="Description of Artificial Sequence: Synthetic oligonucleotide"
uucuaaaggaagcagaaua

SEQ ID NO: 867 - RNA, 19 nt, Artificial Sequence
  source: /note="Description of Artificial Sequence: Synthetic oligonucleotide"
ucuaaaggaagcagaauag

SEQ ID NO: 868 - RNA, 19 nt, Artificial Sequence
  source: /note="Description of Artificial Sequence: Synthetic oligonucleotide"
cuaaaggaagcagaauagc

SEQ ID NO: 869 - RNA, 19 nt, Artificial Sequence
  source: /note="Description of Artificial Sequence: Synthetic oligonucleotide"
aaaggaagcagaauagcuc

SEQ ID NO: 870 - RNA, 19 nt, Artificial Sequence
  source: /note="Description of Artificial Sequence: Synthetic oligonucleotide"
auaaguaagaugcauuuac

SEQ ID NO: 871 - RNA, 19 nt, Artificial Sequence
  source: /note="Description of Artificial Sequence: Synthetic oligonucleotide"
uaaguaagaugcauuuacu

SEQ ID NO: 872 - RNA, 19 nt, Artificial Sequence
  source: /note="Description of Artificial Sequence: Synthetic oligonucleotide"
aaguaagaugcauuuacua

SEQ ID NO: 873 - RNA, 19 nt, Artificial Sequence
  source: /note="Description of Artificial Sequence: Synthetic oligonucleotide"
aguaagaugcauuuacuac

SEQ ID NO: 874 - RNA, 19 nt, Artificial Sequence
  source: /note="Description of Artificial Sequence: Synthetic oligonucleotide"
guaagaugcauuuacuaca

SEQ ID NO: 875 - RNA, 19 nt, Artificial Sequence
  source: /note="Description of Artificial Sequence: Synthetic oligonucleotide"
uaagaugcauuuacuacag

SEQ ID NO: 876 - RNA, 19 nt, Artificial Sequence
  source: /note="Description of Artificial Sequence: Synthetic oligonucleotide"
uuggcuucuaaugcuucag

SEQ ID NO: 877 - RNA, 19 nt, Artificial Sequence
  source: /note="Description of Artificial Sequence: Synthetic oligonucleotide"
uggcuucuaaugcuucaga

SEQ ID NO: 878 - RNA, 19 nt, Artificial Sequence
  source: /note="Description of Artificial Sequence: Synthetic oligonucleotide"
ggcuucuaaugcuucagau

SEQ ID NO: 879 - RNA, 19 nt, Artificial Sequence
  source: /note="Description of Artificial Sequence: Synthetic oligonucleotide"
gcuucuaaugcuucagaua

SEQ ID NO: 880 - RNA, 19 nt, Artificial Sequence
  source: /note="Description of Artificial Sequence: Synthetic oligonucleotide"
ucuaaugcuucagauagaa

SEQ ID NO: 881 - RNA, 19 nt, Artificial Sequence
  source: /note="Description of Artificial Sequence: Synthetic oligonucleotide"
cuaaugcuucagauagaau

SEQ ID NO: 882 - RNA, 19 nt, Artificial Sequence
  source: /note="Description of Artificial Sequence: Synthetic oligonucleotide"
uaaugcuucagauagaaua

SEQ ID NO: 883 - RNA, 19 nt, Artificial Sequence
  source: /note="Description of Artificial Sequence: Synthetic oligonucleotide"
aaugcuucagauagaauac

SEQ ID NO: 884 - RNA, 19 nt, Artificial Sequence
  source: /note="Description of Artificial Sequence: Synthetic oligonucleotide"
augcuucagauagaauaca

SEQ ID NO: 885 - RNA, 19 nt, Artificial Sequence
  source: /note="Description of Artificial Sequence: Synthetic oligonucleotide"
ugcuucagauagaauacag

SEQ ID NO: 886 - RNA, 19 nt, Artificial Sequence
  source: /note="Description of Artificial Sequence: Synthetic oligonucleotide"
gcuucagauagaauacagu

SEQ ID NO: 887 - RNA, 19 nt, Artificial Sequence
  source: /note="Description of Artificial Sequence: Synthetic oligonucleotide"
cuucagauagaauacaguu

SEQ ID NO: 888 - RNA, 19 nt, Artificial Sequence
  source: /note="Description of Artificial Sequence: Synthetic oligonucleotide"
uucagauagaauacaguug

SEQ ID NO: 889 - RNA, 19 nt, Artificial Sequence
  source: /note="Description of Artificial Sequence: Synthetic oligonucleotide"
ucagauagaauacaguugg

SEQ ID NO: 890 - RNA, 19 nt, Artificial Sequence
  source: /note="Description of Artificial Sequence: Synthetic oligonucleotide"
cagauagaauacaguuggg

SEQ ID NO: 891 - RNA, 19 nt, Artificial Sequence
  source: /note="Description of Artificial Sequence: Synthetic oligonucleotide"
cauugugaaauaaaauuuu

SEQ ID NO: 892 - RNA, 19 nt, Artificial Sequence
  source: /note="Description of Artificial Sequence: Synthetic oligonucleotide"
auugugaaauaaaauuuuc

SEQ ID NO: 893 - RNA, 19 nt, Artificial Sequence
  source: /note="Description of Artificial Sequence: Synthetic oligonucleotide"
uugugaaauaaaauuuucu

SEQ ID NO: 894 - RNA, 19 nt, Artificial Sequence
  source: /note="Description of Artificial Sequence: Synthetic oligonucleotide"
ugugaaauaaaauuuucuu

SEQ ID NO: 895 - RNA, 19 nt, Artificial Sequence
  source: /note="Description of Artificial Sequence: Synthetic oligonucleotide"
gugaaauaaaauuuucuua

SEQ ID NO: 896 - RNA, 19 nt, Artificial Sequence
  source: /note="Description of Artificial Sequence: Synthetic oligonucleotide"
ugaaauaaaauuuucuuac

SEQ ID NO: 897 - RNA, 19 nt, Artificial Sequence
  source: /note="Description of Artificial Sequence: Synthetic oligonucleotide"
gaaauaaaauuuucuuacc

SEQ ID NO: 898 - RNA, 19 nt, Artificial Sequence
  source: /note="Description of Artificial Sequence: Synthetic oligonucleotide"
aaauaaaauuuucuuaccc

SEQ ID NO: 899 - RNA, 19 nt, Artificial Sequence
  source: /note="Description of Artificial Sequence: Synthetic oligonucleotide"
aauaaaauuuucuuaccca

SEQ ID NO: 900 - RNA, 19 nt, Artificial Sequence
  source: /note="Description of Artificial Sequence: Synthetic oligonucleotide"
auaaaauuuucuuacccaa

SEQ ID NO: 901 - RNA, 19 nt, Artificial Sequence
  source: /note="Description of Artificial Sequence: Synthetic oligonucleotide"
gcuggauucauugggacug

SEQ ID NO: 902 - RNA, 19 nt, Artificial Sequence
  source: /note="Description of Artificial Sequence: Synthetic oligonucleotide"
agcuggauucauugggacu

SEQ ID NO: 903 - RNA, 19 nt, Artificial Sequence
  source: /note="Description of Artificial Sequence: Synthetic oligonucleotide"
cagcuggauucauugggac

SEQ ID NO: 904 - RNA, 19 nt, Artificial Sequence
  source: /note="Description of Artificial Sequence: Synthetic oligonucleotide"
uuauggaugacugacaugg

SEQ ID NO: 905 - RNA, 19 nt, Artificial Sequence
  source: /note="Description of Artificial Sequence: Synthetic oligonucleotide"
aguuauggaugacugacau

SEQ ID NO: 906 - RNA, 19 nt, Artificial Sequence
  source: /note="Description of Artificial Sequence: Synthetic oligonucleotide"
ucugguuuggguuuccagc

SEQ ID NO: 907 - RNA, 19 nt, Artificial Sequence
  source: /note="Description of Artificial Sequence: Synthetic oligonucleotide"
aacucucugguuuggguuu

SEQ ID NO: 908 - RNA, 19 nt, Artificial Sequence
  source: /note="Description of Artificial Sequence: Synthetic oligonucleotide"
caacucucugguuuggguu

SEQ ID NO: 909 - RNA, 19 nt, Artificial Sequence
  source: /note="Description of Artificial Sequence: Synthetic oligonucleotide"
cagaacugacuugucucgg

SEQ ID NO: 910 - RNA, 19 nt, Artificial Sequence
  source: /note="Description of Artificial Sequence: Synthetic oligonucleotide"
uccagaacugacuugucuc

SEQ ID NO: 911 - RNA, 19 nt, Artificial Sequence
  source: /note="Description of Artificial Sequence: Synthetic oligonucleotide"
cuccagaacugacuugucu

SEQ ID NO: 912 - RNA, 19 nt, Artificial Sequence
  source: /note="Description of Artificial Sequence: Synthetic oligonucleotide"
uucucuuccuccagaacug

SEQ ID NO: 913 - RNA, 19 nt, Artificial Sequence
  source: /note="Description of Artificial Sequence: Synthetic oligonucleotide"
cuucucuuccuccagaacu

SEQ ID NO: 914 - RNA, 19 nt, Artificial Sequence
  source: /note="Description of Artificial Sequence: Synthetic oligonucleotide"
cuucuucucuuccuccaga

SEQ ID NO: 915 - RNA, 19 nt, Artificial Sequence
  source: /note="Description of Artificial Sequence: Synthetic oligonucleotide"
agaaacuucucuggagccu

SEQ ID NO: 916 - RNA, 19 nt, Artificial Sequence
  source: /note="Description of Artificial Sequence: Synthetic oligonucleotide"
uagaaacuucucuggagcc

SEQ ID NO: 917 - RNA, 19 nt, Artificial Sequence
  source: /note="Description of Artificial Sequence: Synthetic oligonucleotide"
guagaaacuucucuggagc

SEQ ID NO: 918 - RNA, 19 nt, Artificial Sequence
  source: /note="Description of Artificial Sequence: Synthetic oligonucleotide"
cguagaaacuucucuggag

SEQ ID NO: 919 - RNA, 19 nt, Artificial Sequence
  source: /note="Description of Artificial Sequence: Synthetic oligonucleotide"
ucaguuagcucggacuuca

SEQ ID NO: 920 - RNA, 19 nt, Artificial Sequence
  source: /note="Description of Artificial Sequence: Synthetic oligonucleotide"
aacuucaguuagcucggac

SEQ ID NO: 921 - RNA, 19 nt, Artificial Sequence
  source: /note="Description of Artificial Sequence: Synthetic oligonucleotide"
gaacuucaguuagcucgga

SEQ ID NO: 922 - RNA, 19 nt, Artificial Sequence
  source: /note="Description of Artificial Sequence: Synthetic oligonucleotide"
ggaacuucaguuagcucgg

SEQ ID NO: 923 - RNA, 19 nt, Artificial Sequence
  source: /note="Description of Artificial Sequence: Synthetic oligonucleotide"
aggaacuucaguuagcucg

SEQ ID NO: 924 - RNA, 19 nt, Artificial Sequence
  source: /note="Description of Artificial Sequence: Synthetic oligonucleotide"
caggaacuucaguuagcuc

SEQ ID NO: 925 - RNA, 19 nt, Artificial Sequence
  source: /note="Description of Artificial Sequence: Synthetic oligonucleotide"
gcaggaacuucaguuagcu

SEQ ID NO: 926 - RNA, 19 nt, Artificial Sequence
  source: /note="Description of Artificial Sequence: Synthetic oligonucleotide"
agcaggaacuucaguuagc

SEQ ID NO: 927 - RNA, 19 nt, Artificial Sequence
  source: /note="Description of Artificial Sequence: Synthetic oligonucleotide"
aaauucgggaagcaggaac

SEQ ID NO: 928 - RNA, 19 nt, Artificial Sequence
  source: /note="Description of Artificial Sequence: Synthetic oligonucleotide"
aaaauucgggaagcaggaa

SEQ ID NO: 929 - RNA, 19 nt, Artificial Sequence
  source: /note="Description of Artificial Sequence: Synthetic oligonucleotide"
caaaauucgggaagcagga

SEQ ID NO: 930 - RNA, 19 nt, Artificial Sequence
  source: /note="Description of Artificial Sequence: Synthetic oligonucleotide"
ucaaaauucgggaagcagg

SEQ ID NO: 931 - RNA, 19 nt, Artificial Sequence
  source: /note="Description of Artificial Sequence: Synthetic oligonucleotide"
uucaaaauucgggaagcag

SEQ ID NO: 932 - RNA, 19 nt, Artificial Sequence
  source: /note="Description of Artificial Sequence: Synthetic oligonucleotide"
cuucaaaauucgggaagca

SEQ ID NO: 933 - RNA, 19 nt, Artificial Sequence
  source: /note="Description of Artificial Sequence: Synthetic oligonucleotide"
ccuucaaaauucgggaagc

SEQ ID NO: 934 - RNA, 19 nt, Artificial Sequence
  source: /note="Description of Artificial Sequence: Synthetic oligonucleotide"
uccuucaaaauucgggaag

SEQ ID NO: 935 - RNA, 19 nt, Artificial Sequence
  source: /note="Description of Artificial Sequence: Synthetic oligonucleotide"
cuccuucaaaauucgggaa

SEQ ID NO: 936 - RNA, 19 nt, Artificial Sequence
  source: /note="Description of Artificial Sequence: Synthetic oligonucleotide"
ucuccuucaaaauucggga

SEQ ID NO: 937 - RNA, 19 nt, Artificial Sequence
  source: /note="Description of Artificial Sequence: Synthetic oligonucleotide"
cucuccuucaaaauucggg

SEQ ID NO: 938 - RNA, 19 nt, Artificial Sequence
  source: /note="Description of Artificial Sequence: Synthetic oligonucleotide"
aacuaguucuccacauccg

SEQ ID NO: 939 - RNA, 19 nt, Artificial Sequence
  source: /note="Description of Artificial Sequence: Synthetic oligonucleotide"
aaacuaguucuccacaucc

SEQ ID NO: 940 - RNA, 19 nt, Artificial Sequence
  source: /note="Description of Artificial Sequence: Synthetic oligonucleotide"
caaacuaguucuccacauc

SEQ ID NO: 941 - RNA, 19 nt, Artificial Sequence
  source: /note="Description of Artificial Sequence: Synthetic oligonucleotide"
ccaaacuaguucuccacau

SEQ ID NO: 942 - RNA, 19 nt, Artificial Sequence
  source: /note="Description of Artificial Sequence: Synthetic oligonucleotide"
cccaaacuaguucuccaca

SEQ ID NO: 943 - RNA, 19 nt, Artificial Sequence
  source: /note="Description of Artificial Sequence: Synthetic oligonucleotide"
acccaaacuaguucuccac

SEQ ID NO: 944 - RNA, 19 nt, Artificial Sequence
  source: /note="Description of Artificial Sequence: Synthetic oligonucleotide"
uacccaaacuaguucucca

SEQ ID NO: 945 - RNA, 19 nt, Artificial Sequence
  source: /note="Description of Artificial Sequence: Synthetic oligonucleotide"
cuacccaaacuaguucucc

SEQ ID NO: 946 - RNA, 19 nt, Artificial Sequence
  source: /note="Description of Artificial Sequence: Synthetic oligonucleotide"
ccuacccaaacuaguucuc

SEQ ID NO: 947 - RNA, 19 nt, Artificial Sequence
  source: /note="Description of Artificial Sequence: Synthetic oligonucleotide"
uuucugcuguucucagcgu

SEQ ID NO: 948 - RNA, 19 nt, Artificial Sequence
  source: /note="Description of Artificial Sequence: Synthetic oligonucleotide"
uguuucugcuguucucagc

SEQ ID NO: 949 - RNA, 19 nt, Artificial Sequence
  source: /note="Description of Artificial Sequence: Synthetic oligonucleotide"
uuguuucugcuguucucag

SEQ ID NO: 950 - RNA, 19 nt, Artificial Sequence
  source: /note="Description of Artificial Sequence: Synthetic oligonucleotide"
auuguuucugcuguucuca

SEQ ID NO: 951 - RNA, 19 nt, Artificial Sequence
  source: /note="Description of Artificial Sequence: Synthetic oligonucleotide"
aauuguuucugcuguucuc

SEQ ID NO: 952 - RNA, 19 nt, Artificial Sequence
  source: /note="Description of Artificial Sequence: Synthetic oligonucleotide"
uaauuguuucugcuguucu

SEQ ID NO: 953 - RNA, 19 nt, Artificial Sequence
  source: /note="Description of Artificial Sequence: Synthetic oligonucleotide"
guaauuguuucugcuguuc

SEQ ID NO: 954 - RNA, 19 nt, Artificial Sequence
  source: /note="Description of Artificial Sequence: Synthetic oligonucleotide"
aguaauuguuucugcuguu

SEQ ID NO: 955 - RNA, 19 nt, Artificial Sequence
  source: /note="Description of Artificial Sequence: Synthetic oligonucleotide"
caguaauuguuucugcugu

SEQ ID NO: 956 - RNA, 19 nt, Artificial Sequence
  source: /note="Description of Artificial Sequence: Synthetic oligonucleotide"
ccaguaauuguuucugcug

SEQ ID NO: 957 - RNA, 19 nt, Artificial Sequence
  source: /note="Description of Artificial Sequence: Synthetic oligonucleotide"
gccaguaauuguuucugcu

SEQ ID NO: 958 - RNA, 19 nt, Artificial Sequence
  source: /note="Description of Artificial Sequence: Synthetic oligonucleotide"
ugccaguaauuguuucugc

SEQ ID NO: 959 - RNA, 19 nt, Artificial Sequence
  source: /note="Description of Artificial Sequence: Synthetic oligonucleotide"
uugccaguaauuguuucug

SEQ ID NO: 960 - RNA, 19 nt, Artificial Sequence
  source: /note="Description of Artificial Sequence: Synthetic oligonucleotide"
cuugccaguaauuguuucu

SEQ ID NO: 961 - RNA, 19 nt, Artificial Sequence
  source: /note="Description of Artificial Sequence: Synthetic oligonucleotide"
acuugccaguaauuguuuc

SEQ ID NO: 962 - RNA, 19 nt, Artificial Sequence
  source: /note="Description of Artificial Sequence: Synthetic oligonucleotide"
auacuugccaguaauuguu

SEQ ID NO: 963 - RNA, 19 nt, Artificial Sequence
  source: /note="Description of Artificial Sequence: Synthetic oligonucleotide"
cauacuugccaguaauugu

SEQ ID NO: 964 - RNA, 19 nt, Artificial Sequence
  source: /note="Description of Artificial Sequence: Synthetic oligonucleotide"
ccauacuugccaguaauug

SEQ ID NO: 965 - RNA, 19 nt, Artificial Sequence
  source: /note="Description of Artificial Sequence: Synthetic oligonucleotide"
accauacuugccaguaauu

SEQ ID NO: 966 - RNA, 19 nt, Artificial Sequence
  source: /note="Description of Artificial Sequence: Synthetic oligonucleotide"
cacaccauacuugccagua

SEQ ID NO: 967 - RNA, 19 nt, Artificial Sequence
  source: /note="Description of Artificial Sequence: Synthetic oligonucleotide"
ucaaaaaccuggcggacau

SEQ ID NO: 968 - RNA, 19 nt, Artificial Sequence
  source: /note="Description of Artificial Sequence: Synthetic oligonucleotide"
cucaaaaaccuggcggaca

SEQ ID NO: 969 - RNA, 19 nt, Artificial Sequence
  source: /note="Description of Artificial Sequence: Synthetic oligonucleotide"
acucaaaaaccuggcggac

SEQ ID NO: 970 - RNA, 19 nt, Artificial Sequence
  source: /note="Description of Artificial Sequence: Synthetic oligonucleotide"
uacucaaaaaccuggcgga

SEQ ID NO: 971 - RNA, 19 nt, Artificial Sequence
  source: /note="Description of Artificial Sequence: Synthetic oligonucleotide"
auacucaaaaaccuggcgg

SEQ ID NO: 972 - RNA, 19 nt, Artificial Sequence
  source: /note="Description of Artificial Sequence: Synthetic oligonucleotide"
cauacucaaaaaccuggcg

SEQ ID NO: 973 - RNA, 19 nt, Artificial Sequence
  source: /note="Description of Artificial Sequence: Synthetic oligonucleotide"
ucauacucaaaaaccuggc

SEQ ID NO: 974 - RNA, 19 nt, Artificial Sequence
  source: /note="Description of Artificial Sequence: Synthetic oligonucleotide"
gucauacucaaaaaccugg

SEQ ID NO: 975 - RNA, 19 nt, Artificial Sequence
  source: /note="Description of Artificial Sequence: Synthetic oligonucleotide"
ggucauacucaaaaaccug

SEQ ID NO: 976 - RNA, 19 nt, Artificial Sequence
  source: /note="Description of Artificial Sequence: Synthetic oligonucleotide"
aggucauacucaaaaaccu

SEQ ID NO: 977 - RNA, 19 nt, Artificial Sequence
  source: /note="Description of Artificial Sequence: Synthetic oligonucleotide"
gaggucauacucaaaaacc

SEQ ID NO: 978 - RNA, 19 nt, Artificial Sequence
  source: /note="Description of Artificial Sequence: Synthetic oligonucleotide"
ugaggucauacucaaaaac

SEQ ID NO: 979 - RNA, 19 nt, Artificial Sequence
  source: /note="Description of Artificial Sequence: Synthetic oligonucleotide"
uaaacuggcugaugagguc

SEQ ID NO: 980 - RNA, 19 nt, Artificial Sequence
  source: /note="Description of Artificial Sequence: Synthetic oligonucleotide"
auaaacuggcugaugaggu

SEQ ID NO: 981 - RNA, 19 nt, Artificial Sequence
  source: /note="Description of Artificial Sequence: Synthetic oligonucleotide"
cauaaacuggcugaugagg

SEQ ID NO: 982 - RNA, 19 nt, Artificial Sequence
  source: /note="Description of Artificial Sequence: Synthetic oligonucleotide"
gcauaaacuggcugaugag

SEQ ID NO: 983 - RNA, 19 nt, Artificial Sequence
  source: /note="Description of Artificial Sequence: Synthetic oligonucleotide"
ugcauaaacuggcugauga

SEQ ID NO: 984 - RNA, 19 nt, Artificial Sequence
  source: /note="Description of Artificial Sequence: Synthetic oligonucleotide"
cccugcauaaacuggcuga

SEQ ID NO: 985 - RNA, 19 nt, Artificial Sequence
  source: /note="Description of Artificial Sequence: Synthetic oligonucleotide"
gaaccuuagaaggguagcc

SEQ ID NO: 986 - RNA, 19 nt, Artificial Sequence
  source: /note="Description of Artificial Sequence: Synthetic oligonucleotide"
ugaaccuuagaaggguagc

SEQ ID NO: 987 - RNA, 19 nt, Artificial Sequence
  source: /note="Description of Artificial Sequence: Synthetic oligonucleotide"
gugaaccuuagaaggguag

SEQ ID NO: 988 - RNA, 19 nt, Artificial Sequence
  source: /note="Description of Artificial Sequence: Synthetic oligonucleotide"
ugugaaccuuagaagggua

SEQ ID NO: 989 - RNA, 19 nt, Artificial Sequence
  source: /note="Description of Artificial Sequence: Synthetic oligonucleotide"
augugaaccuuagaagggu

SEQ ID NO: 990 - RNA, 19 nt, Artificial Sequence
  source: /note="Description of Artificial Sequence: Synthetic oligonucleotide"
uaugugaaccuuagaaggg

SEQ ID NO: 991 - RNA, 19 nt, Artificial Sequence
  source: /note="Description of Artificial Sequence: Synthetic oligonucleotide"
guaugugaaccuuagaagg

SEQ ID NO: 992 - RNA, 19 nt, Artificial Sequence
  source: /note="Description of Artificial Sequence: Synthetic oligonucleotide"
aguaugugaaccuuagaag

SEQ ID NO: 993 - RNA, 19 nt, Artificial Sequence
  source: /note="Description of Artificial Sequence: Synthetic oligonucleotide"
caguaugugaaccuuagaa

SEQ ID NO: 994 - RNA, 19 nt, Artificial Sequence
  source: /note="Description of Artificial Sequence: Synthetic oligonucleotide"
ggcaguaugugaaccuuag

SEQ ID NO: 995 - RNA, 19 nt, Artificial Sequence
  source: /note="Description of Artificial Sequence: Synthetic oligonucleotide"
aggcaguaugugaaccuua

SEQ ID NO: 996 - RNA, 19 nt, Artificial Sequence
  source: /note="Description of Artificial Sequence: Synthetic oligonucleotide"
uuaugacaguucuggacuc

SEQ ID NO: 997 - RNA, 19 nt, Artificial Sequence
  source: /note="Description of Artificial Sequence: Synthetic oligonucleotide"
cuuaugacaguucuggacu

SEQ ID NO: 998 - RNA, 19 nt, Artificial Sequence
  source: /note="Description of Artificial Sequence: Synthetic oligonucleotide"
ucuuaugacaguucuggac

SEQ ID NO: 999 - RNA, 19 nt, Artificial Sequence
  source: /note="Description of Artificial Sequence: Synthetic oligonucleotide"
aucuuaugacaguucugga

SEQ ID NO: 1000 - RNA, 19 nt, Artificial Sequence
  source: /note="Description of Artificial Sequence: Synthetic oligonucleotide"
uaucuuaugacaguucugg

SEQ ID NO: 1001 - RNA, 19 nt, Artificial Sequence
  source: /note="Description of Artificial Sequence: Synthetic oligonucleotide"
auaucuuaugacaguucug

SEQ ID NO: 1002 - RNA, 19 nt, Artificial Sequence
  source: /note="Description of Artificial Sequence: Synthetic oligonucleotide"
cauaucuuaugacaguucu

SEQ ID NO: 1003 - RNA, 19 nt, Artificial Sequence
  source: /note="Description of Artificial Sequence: Synthetic oligonucleotide"
ucauaucuuaugacaguuc

SEQ ID NO: 1004 - RNA, 19 nt, Artificial Sequence
  source: /note="Description of Artificial Sequence: Synthetic oligonucleotide"
cucauaucuuaugacaguu

SEQ ID NO: 1005 - RNA, 19 nt, Artificial Sequence
  source: /note="Description of Artificial Sequence: Synthetic oligonucleotide"
gcucauaucuuaugacagu

SEQ ID NO: 1006 - RNA, 19 nt, Artificial Sequence
  source: /note="Description of Artificial Sequence: Synthetic oligonucleotide"
agcucauaucuuaugacag

SEQ ID NO: 1007 - RNA, 19 nt, Artificial Sequence
  source: /note="Description of Artificial Sequence: Synthetic oligonucleotide"
cagcucauaucuuaugaca

SEQ ID NO: 1008 - RNA, 19 nt, Artificial Sequence
  source: /note="Description of Artificial Sequence: Synthetic oligonucleotide"
ucagcucauaucuuaugac

SEQ ID NO: 1009 - RNA, 19 nt, Artificial Sequence
  source: /note="Description of Artificial Sequence: Synthetic oligonucleotide"
gguauucagcucauaucuu

SEQ ID NO: 1010 - RNA, 19 nt, Artificial Sequence
  source: /note="Description of Artificial Sequence: Synthetic oligonucleotide"
uucacugucucgguauuca

SEQ ID NO: 1011 - RNA, 19 nt, Artificial Sequence
  source: /note="Description of Artificial Sequence: Synthetic oligonucleotide"
auuuccuucucagccuuca

SEQ ID NO: 1012 - RNA, 19 nt, Artificial Sequence
  source: /note="Description of Artificial Sequence: Synthetic oligonucleotide"
agggauuuccuucucagcc

SEQ ID NO: 1013 - RNA, 19 nt, Artificial Sequence
  source: /note="Description of Artificial Sequence: Synthetic oligonucleotide"
agaauacgggaacuguccg

SEQ ID NO: 1014 - RNA, 19 nt, Artificial Sequence
  source: /note="Description of Artificial Sequence: Synthetic oligonucleotide"
aagaauacgggaacugucc

SEQ ID NO: 1015 - RNA, 19 nt, Artificial Sequence
  source: /note="Description of Artificial Sequence: Synthetic oligonucleotide"
caagaauacgggaacuguc

SEQ ID NO: 1016 - RNA, 19 nt, Artificial Sequence
  source: /note="Description of Artificial Sequence: Synthetic oligonucleotide"
ccaagaauacgggaacugu

SEQ ID NO: 1017 - RNA, 19 nt, Artificial Sequence
  source: /note="Description of Artificial Sequence: Synthetic oligonucleotide"
cuguaaaugacccagaggc

SEQ ID NO: 1018 - RNA, 19 nt, Artificial Sequence
  source: /note="Description of Artificial Sequence: Synthetic oligonucleotide"
aguuuggagaggacaaugg

SEQ ID NO: 1019 - RNA, 19 nt, Artificial Sequence
  source: /note="Description of Artificial Sequence: Synthetic oligonucleotide"
caguuuggagaggacaaug

SEQ ID NO: 1020 - RNA, 19 nt, Artificial Sequence
  source: /note="Description of Artificial Sequence: Synthetic oligonucleotide"
ucaguuuggagaggacaau

SEQ ID NO: 1021 - RNA, 19 nt, Artificial Sequence
  source: /note="Description of Artificial Sequence: Synthetic oligonucleotide"
uucaguuuggagaggacaa

SEQ ID NO: 1022 - RNA, 19 nt, Artificial Sequence
  source: /note="Description of Artificial Sequence: Synthetic oligonucleotide"
ucuggguucaguuuggaga

SEQ ID NO: 1023 - RNA, 19 nt, Artificial Sequence
  source: /note="Description of Artificial Sequence: Synthetic oligonucleotide"
auucucuggguucaguuug

SEQ ID NO: 1024 - RNA, 19 nt, Artificial Sequence
  source: /note="Description of Artificial Sequence: Synthetic oligonucleotide"
gauucucuggguucaguuu

SEQ ID NO: 1025 - RNA, 19 nt, Artificial Sequence
  source: /note="Description of Artificial Sequence: Synthetic oligonucleotide"
gaguuccagauucucuggg

SEQ ID NO: 1026 - RNA, 19 nt, Artificial Sequence
  source: /note="Description of Artificial Sequence: Synthetic oligonucleotide"
ugaugaaggcauuggcgac

SEQ ID NO: 1027 - RNA, 19 nt, Artificial Sequence
  source: /note="Description of Artificial Sequence: Synthetic oligonucleotide"
cagaugaugaaggcauugg

SEQ ID NO: 1028 - RNA, 19 nt, Artificial Sequence
  source: /note="Description of Artificial Sequence: Synthetic oligonucleotide"
cacagaugaugaaggcauu

SEQ ID NO: 1029 - RNA, 19 nt, Artificial Sequence
  source: /note="Description of Artificial Sequence: Synthetic oligonucleotide"
ccacagaugaugaaggcau

SEQ ID NO: 1030 - RNA, 19 nt, Artificial Sequence
  source: /note="Description of Artificial Sequence: Synthetic oligonucleotide"
acgguguacaaggugccac

SEQ ID NO: 1031 - RNA, 19 nt, Artificial Sequence
  source: /note="Description of Artificial Sequence: Synthetic oligonucleotide"
cauaagcaaaguugacggu

SEQ ID NO: 1032 - RNA, 19 nt, Artificial Sequence
  source: /note="Description of Artificial Sequence: Synthetic oligonucleotide"
ucauaagcaaaguugacgg

SEQ ID NO: 1033 - RNA, 19 nt, Artificial Sequence
  source: /note="Description of Artificial Sequence: Synthetic oligonucleotide"
gucauaagcaaaguugacg

SEQ ID NO: 1034 - RNA, 19 nt, Artificial Sequence
  source: /note="Description of Artificial Sequence: Synthetic oligonucleotide"
ugucauaagcaaaguugac

SEQ ID NO: 1035 - RNA, 19 nt, Artificial Sequence
  source: /note="Description of Artificial Sequence: Synthetic oligonucleotide"
gugucauaagcaaaguuga

SEQ ID NO: 1036 - RNA, 19 nt, Artificial Sequence
  source: /note="Description of Artificial Sequence: Synthetic oligonucleotide"
uugaaugggauggucaggg

SEQ ID NO: 1037 - RNA, 19 nt, Artificial Sequence
  source: /note="Description of Artificial Sequence: Synthetic oligonucleotide"
cuugaaugggauggucagg

SEQ ID NO: 1038 - RNA, 19 nt, Artificial Sequence
  source: /note="Description of Artificial Sequence: Synthetic oligonucleotide"
ucuugaaugggauggucag

SEQ ID NO: 1039 - RNA, 19 nt, Artificial Sequence
  source: /note="Description of Artificial Sequence: Synthetic oligonucleotide"
cgguucuugaaugggaugg

SEQ ID NO: 1040 - RNA, 19 nt, Artificial Sequence
  source: /note="Description of Artificial Sequence: Synthetic oligonucleotide"
agcgguucuugaaugggau

SEQ ID NO: 1041 - RNA, 19 nt, Artificial Sequence
  source: /note="Description of Artificial Sequence: Synthetic oligonucleotide"
uagcgguucuugaauggga

SEQ ID NO: 1042 - RNA, 19 nt, Artificial Sequence
  source: /note="Description of Artificial Sequence: Synthetic oligonucleotide"
auagcgguucuugaauggg

SEQ ID NO: 1043 - RNA, 19 nt, Artificial Sequence
  source: /note="Description of Artificial Sequence: Synthetic oligonucleotide"
caaucaugcugcuguacuu

SEQ ID NO: 1044 - RNA, 19 nt, Artificial Sequence
  source: /note="Description of Artificial Sequence: Synthetic oligonucleotide"
ucaaucaugcugcuguacu

SEQ ID NO: 1045 - RNA, 19 nt, Artificial Sequence
  source: /note="Description of Artificial Sequence: Synthetic oligonucleotide"
uagucaaucaugcugcugu

SEQ ID NO: 1046 - RNA, 19 nt, Artificial Sequence
  source: /note="Description of Artificial Sequence: Synthetic oligonucleotide"
guagucaaucaugcugcug

SEQ ID NO: 1047 - RNA, 19 nt, Artificial Sequence
  source: /note="Description of Artificial Sequence: Synthetic oligonucleotide"
uguagucaaucaugcugcu

SEQ ID NO: 1048 - RNA, 19 nt, Artificial Sequence
  source: /note="Description of Artificial Sequence: Synthetic oligonucleotide"
uuguagucaaucaugcugc

SEQ ID NO: 1049 - RNA, 19 nt, Artificial Sequence
  source: /note="Description of Artificial Sequence: Synthetic oligonucleotide"
guuguagucaaucaugcug

SEQ ID NO: 1050 - RNA, 19 nt, Artificial Sequence
  source: /note="Description of Artificial Sequence: Synthetic oligonucleotide"
gguuguagucaaucaugcu

SEQ ID NO: 1051 - RNA, 19 nt, Artificial Sequence
  source: /note="Description of Artificial Sequence: Synthetic oligonucleotide"
ggguuguagucaaucaugc

SEQ ID NO: 1052 - RNA, 19 nt, Artificial Sequence
  source: /note="Description of Artificial Sequence: Synthetic oligonucleotide"
aaguugucccaggcaaaga

SEQ ID NO: 1053 - RNA, 19 nt, Artificial Sequence
  source: /note="Description of Artificial Sequence: Synthetic oligonucleotide"
uucaaguugucccaggcaa

SEQ ID NO: 1054 - RNA, 19 nt, Artificial Sequence
  source: /note="Description of Artificial Sequence: Synthetic oligonucleotide"
auguucaaguugucccagg

SEQ ID NO: 1055 - RNA, 19 nt, Artificial Sequence
  source: /note="Description of Artificial Sequence: Synthetic oligonucleotide"
cauguucaaguugucccag

SEQ ID NO: 1056 - RNA, 19 nt, Artificial Sequence
  source: /note="Description of Artificial Sequence: Synthetic oligonucleotide"
ccauguucaaguuguccca

SEQ ID NO: 1057 - RNA, 19 nt, Artificial Sequence
  source: /note="Description of Artificial Sequence: Synthetic oligonucleotide"
accauguucaaguuguccc

SEQ ID NO: 1058 - RNA, 19 nt, Artificial Sequence
  source: /note="Description of Artificial Sequence: Synthetic oligonucleotide"
gaccauguucaaguugucc

SEQ ID NO: 1059 - RNA, 19 nt, Artificial Sequence
  source: /note="Description of Artificial Sequence: Synthetic oligonucleotide"
ugaccauguucaaguuguc

SEQ ID NO: 1060 - RNA, 19 nt, Artificial Sequence
  source: /note="Description of Artificial Sequence: Synthetic oligonucleotide"
gugaccauguucaaguugu

SEQ ID NO: 1061 - RNA, 19 nt, Artificial Sequence
  source: /note="Description of Artificial Sequence: Synthetic oligonucleotide"
agugaccauguucaaguug

SEQ ID NO: 1062 - RNA, 19 nt, Artificial Sequence
  source: /note="Description of Artificial Sequence: Synthetic oligonucleotide"
uaagugaccauguucaagu

SEQ ID NO: 1063 - RNA, 19 nt, Artificial Sequence
  source: /note="Description of Artificial Sequence: Synthetic oligonucleotide"
auaagugaccauguucaag

SEQ ID NO: 1064 - RNA, 19 nt, Artificial Sequence
  source: /note="Description of Artificial Sequence: Synthetic oligonucleotide"
cauaagugaccauguucaa

SEQ ID NO: 1065 - RNA, 19 nt, Artificial Sequence
  source: /note="Description of Artificial Sequence: Synthetic oligonucleotide"
ucauaagugaccauguuca

SEQ ID NO: 1066 - RNA, 19 nt, Artificial Sequence
  source: /note="Description of Artificial Sequence: Synthetic oligonucleotide"
gucauaagugaccauguuc

SEQ ID NO: 1067 - RNA, 19 nt, Artificial Sequence
  source: /note="Description of Artificial Sequence: Synthetic oligonucleotide"
ugucauaagugaccauguu

SEQ ID NO: 1068 - RNA, 19 nt, Artificial Sequence
  source: /note="Description of Artificial Sequence: Synthetic oligonucleotide"
augucauaagugaccaugu

SEQ ID NO: 1069 - RNA, 19 nt, Artificial Sequence
  source: /note="Description of Artificial Sequence: Synthetic oligonucleotide"
gaugucauaagugaccaug

SEQ ID NO: 1070 - RNA, 19 nt, Artificial Sequence
  source: /note="Description of Artificial Sequence: Synthetic oligonucleotide"
uugaugucauaagugacca

SEQ ID NO: 1071 - RNA, 19 nt, Artificial Sequence
  source: /note="Description of Artificial Sequence: Synthetic oligonucleotide"
cuugaugucauaagugacc

SEQ ID NO: 1072 - RNA, 19 nt, Artificial Sequence
  source: /note="Description of Artificial Sequence: Synthetic oligonucleotide"
gcuugaugucauaagugac

SEQ ID NO: 1073 - RNA, 19 nt, Artificial Sequence
  source: /note="Description of Artificial Sequence: Synthetic oligonucleotide"
aucuuggagagcuugaugu

SEQ ID NO: 1074 - RNA, 19 nt, Artificial Sequence
  source: /note="Description of Artificial Sequence: Synthetic oligonucleotide"
acaucuuggagagcuugau

SEQ ID NO: 1075 - RNA, 19 nt, Artificial Sequence
  source: /note="Description of Artificial Sequence: Synthetic oligonucleotide"
cacaucuuggagagcuuga

SEQ ID NO: 1076 - RNA, 19 nt, Artificial Sequence
  source: /note="Description of Artificial Sequence: Synthetic oligonucleotide"
uuucacaucuuggagagcu

SEQ ID NO: 1077 - RNA, 19 nt, Artificial Sequence
  source: /note="Description of Artificial Sequence: Synthetic oligonucleotide"
uuuucacaucuuggagagc

SEQ ID NO: 1078 - RNA, 19 nt, Artificial Sequence
  source: /note="Description of Artificial Sequence: Synthetic oligonucleotide"
cuuuucacaucuuggagag

SEQ ID NO: 1079 - RNA, 19 nt, Artificial Sequence
  source: /note="Description of Artificial Sequence: Synthetic oligonucleotide"
gcuuuucacaucuuggaga

SEQ ID NO: 1080 - RNA, 19 nt, Artificial Sequence
  source: /note="Description of Artificial Sequence: Synthetic oligonucleotide"
aggcuuuucacaucuugga

SEQ ID NO: 1081 - RNA, 19 nt, Artificial Sequence
  source: /note="Description of Artificial Sequence: Synthetic oligonucleotide"
gaggcuuuucacaucuugg

SEQ ID NO: 1082 - RNA, 19 nt, Artificial Sequence
  source: /note="Description of Artificial Sequence: Synthetic oligonucleotide"
auggugaccauguucaucc

SEQ ID NO: 1083 - RNA, 19 nt, Artificial Sequence
  source: /note="Description of Artificial Sequence: Synthetic oligonucleotide"
ccucagacuacaauuccug

SEQ ID NO: 1084 - RNA, 19 nt, Artificial Sequence
  source: /note="Description of Artificial Sequence: Synthetic oligonucleotide"
cccucagacuacaauuccu

SEQ ID NO: 1085 - RNA, 19 nt, Artificial Sequence
  source: /note="Description of Artificial Sequence: Synthetic oligonucleotide"
cauaaaugcugacagaaga

SEQ ID NO: 1086 - RNA, 19 nt, Artificial Sequence
  source: /note="Description of Artificial Sequence: Synthetic oligonucleotide"
ccauaaaugcugacagaag

SEQ ID NO: 1087 - RNA, 19 nt, Artificial Sequence
  source: /note="Description of Artificial Sequence: Synthetic oligonucleotide"
cccauaaaugcugacagaa

SEQ ID NO: 1088 - RNA, 19 nt, Artificial Sequence
  source: /note="Description of Artificial Sequence: Synthetic oligonucleotide"
aucccauaaaugcugacag

SEQ ID NO: 1089 - RNA, 19 nt, Artificial Sequence
  source: /note="Description of Artificial Sequence: Synthetic oligonucleotide"
caucccauaaaugcugaca

SEQ ID NO: 1090 - RNA, 19 nt, Artificial Sequence
  source: /note="Description of Artificial Sequence: Synthetic oligonucleotide"
acaucccauaaaugcugac

SEQ ID NO: 1091 - RNA, 19 nt, Artificial Sequence
  source: /note="Description of Artificial Sequence: Synthetic oligonucleotide"
aacaucccauaaaugcuga

SEQ ID NO: 1092 - RNA, 19 nt, Artificial Sequence
  source: /note="Description of Artificial Sequence: Synthetic oligonucleotide"
aaacaucccauaaaugcug

SEQ ID NO: 1093 - RNA, 19 nt, Artificial Sequence
  source: /note="Description of Artificial Sequence: Synthetic oligonucleotide"
uaaacaucccauaaaugcu

SEQ ID NO: 1094 - RNA, 19 nt, Artificial Sequence
  source: /note="Description of Artificial Sequence: Synthetic oligonucleotide"
uuaaacaucccauaaaugc

SEQ ID NO: 1095 - RNA, 19 nt, Artificial Sequence
  source: /note="Description of Artificial Sequence: Synthetic oligonucleotide"
auuaaacaucccauaaaug

SEQ ID NO: 1096 - RNA, 19 nt, Artificial Sequence
  source: /note="Description of Artificial Sequence: Synthetic oligonucleotide"
cauuaaacaucccauaaau

SEQ ID NO: 1097 - RNA, 19 nt, Artificial Sequence
  source: /note="Description of Artificial Sequence: Synthetic oligonucleotide"
ucauuaaacaucccauaaa

SEQ ID NO: 1098 - RNA, 19 nt, Artificial Sequence
  source: /note="Description of Artificial Sequence: Synthetic oligonucleotide"
gucauuaaacaucccauaa

SEQ ID NO: 1099 - RNA, 19 nt, Artificial Sequence
  source: /note="Description of Artificial Sequence: Synthetic oligonucleotide"
augucauuaaacaucccau

SEQ ID NO: 1100 - RNA, 19 nt, Artificial Sequence
  source: /note="Description of Artificial Sequence: Synthetic oligonucleotide"
uaugucauuaaacauccca

SEQ ID NO: 1101 - RNA, 19 nt, Artificial Sequence
  source: /note="Description of Artificial Sequence: Synthetic oligonucleotide"
cuaugucauuaaacauccc

SEQ ID NO: 1102 - RNA, 19 nt, Artificial Sequence
  source: /note="Description of Artificial Sequence: Synthetic oligonucleotide"
acuaugucauuaaacaucc

SEQ ID NO: 1103 - RNA, 19 nt, Artificial Sequence
  source: /note="Description of Artificial Sequence: Synthetic oligonucleotide"
aacuaugucauuaaacauc

SEQ ID NO: 1104 - RNA, 19 nt, Artificial Sequence
  source: /note="Description of Artificial Sequence: Synthetic oligonucleotide"
gaacuaugucauuaaacau

SEQ ID NO: 1105 - RNA, 19 nt, Artificial Sequence
  source: /note="Description of Artificial Sequence: Synthetic oligonucleotide"
ugaacuaugucauuaaaca

SEQ ID NO: 1106 - RNA, 19 nt, Artificial Sequence
  source: /note="Description of Artificial Sequence: Synthetic oligonucleotide"
uugaacuaugucauuaaac

SEQ ID NO: 1107 - RNA, 19 nt, Artificial Sequence
  source: /note="Description of Artificial Sequence: Synthetic oligonucleotide"
cuugaacuaugucauuaaa

SEQ ID NO: 1108 - RNA, 19 nt, Artificial Sequence
  source: /note="Description of Artificial Sequence: Synthetic oligonucleotide"
acuugaacuaugucauuaa

SEQ ID NO: 1109 - RNA, 19 nt, Artificial Sequence
  source: /note="Description of Artificial Sequence: Synthetic oligonucleotide"
aacuugaacuaugucauua

SEQ ID NO: 1110 - RNA, 19 nt, Artificial Sequence
  source: /note="Description of Artificial Sequence: Synthetic oligonucleotide"
aaacuugaacuaugucauu

SEQ ID NO: 1111 - RNA, 19 nt, Artificial Sequence
  source: /note="Description of Artificial Sequence: Synthetic oligonucleotide"
aaaacuugaacuaugucau

SEQ ID NO: 1112 - RNA, 19 nt, Artificial Sequence
  source: /note="Description of Artificial Sequence: Synthetic oligonucleotide"
gaaaacuugaacuauguca

SEQ ID NO: 1113 - RNA, 19 nt, Artificial Sequence
  source: /note="Description of Artificial Sequence: Synthetic oligonucleotide"
agaaaacuugaacuauguc

SEQ ID NO: 1114 - RNA, 19 nt, Artificial Sequence
  source: /note="Description of Artificial Sequence: Synthetic oligonucleotide"
aagaaaacuugaacuaugu

SEQ ID NO: 1115 - RNA, 19 nt, Artificial Sequence
  source: /note="Description of Artificial Sequence: Synthetic oligonucleotide"
caagaaaacuugaacuaug

SEQ ID NO: 1116 - RNA, 19 nt, Artificial Sequence
  source: /note="Description of Artificial Sequence: Synthetic oligonucleotide"
acaagaaaacuugaacuau

SEQ ID NO: 1117 - RNA, 19 nt, Artificial Sequence
  source: /note="Description of Artificial Sequence: Synthetic oligonucleotide"
cacaagaaaacuugaacua

SEQ ID NO: 1118 - RNA, 19 nt, Artificial Sequence
  source: /note="Description of Artificial Sequence: Synthetic oligonucleotide"
ucacaagaaaacuugaacu

SEQ ID NO: 1119 - RNA, 19 nt, Artificial Sequence
  source: /note="Description of Artificial Sequence: Synthetic oligonucleotide"
aucacaagaaaacuugaac

SEQ ID NO: 1120 - RNA, 19 nt, Artificial Sequence
  source: /note="Description of Artificial Sequence: Synthetic oligonucleotide"
aaucacaagaaaacuugaa

SEQ ID NO: 1121 - RNA, 19 nt, Artificial Sequence
  source: /note="Description of Artificial Sequence: Synthetic oligonucleotide"
aaaucacaagaaaacuuga

SEQ ID NO: 1122 - RNA, 19 nt, Artificial Sequence
  source: /note="Description of Artificial Sequence: Synthetic oligonucleotide"
caaaucacaagaaaacuug

SEQ ID NO: 1123 - RNA, 19 nt, Artificial Sequence
  source: /note="Description of Artificial Sequence: Synthetic oligonucleotide"
ccaaaucacaagaaaacuu

SEQ ID NO: 1124 - RNA, 19 nt, Artificial Sequence
  source: /note="Description of Artificial Sequence: Synthetic oligonucleotide"
cccaaaucacaagaaaacu

SEQ ID NO: 1125 - RNA, 19 nt, Artificial Sequence
  source: /note="Description of Artificial Sequence: Synthetic oligonucleotide"
ccccaaaucacaagaaaac

SEQ ID NO: 1126 - RNA, 19 nt, Artificial Sequence
  source: /note="Description of Artificial Sequence: Synthetic oligonucleotide"
gcuuuugccccaaaucaca

SEQ ID NO: 1127 - RNA, 19 nt, Artificial Sequence
  source: /note="Description of Artificial Sequence: Synthetic oligonucleotide"
agcuuuugccccaaaucac

SEQ ID NO: 1128 - RNA, 19 nt, Artificial Sequence
  source: /note="Description of Artificial Sequence: Synthetic oligonucleotide"
cagcuuuugccccaaauca

SEQ ID NO: 1129 - RNA, 19 nt, Artificial Sequence
  source: /note="Description of Artificial Sequence: Synthetic oligonucleotide"
gguuuucaggaagaaacua

SEQ ID NO: 1130 - RNA, 19 nt, Artificial Sequence
  source: /note="Description of Artificial Sequence: Synthetic oligonucleotide"
ugguuuucaggaagaaacu

SEQ ID NO: 1131 - RNA, 19 nt, Artificial Sequence
  source: /note="Description of Artificial Sequence: Synthetic oligonucleotide"
augguuuucaggaagaaac

SEQ ID NO: 1132 - RNA, 19 nt, Artificial Sequence
  source: /note="Description of Artificial Sequence: Synthetic oligonucleotide"
aaugguuuucaggaagaaa

SEQ ID NO: 1133 - RNA, 19 nt, Artificial Sequence
  source: /note="Description of Artificial Sequence: Synthetic oligonucleotide"
caaugguuuucaggaagaa

SEQ ID NO: 1134 - RNA, 19 nt, Artificial Sequence
  source: /note="Description of Artificial Sequence: Synthetic oligonucleotide"
gcaaugguuuucaggaaga

SEQ ID NO: 1135 - RNA, 19 nt, Artificial Sequence
  source: /note="Description of Artificial Sequence: Synthetic oligonucleotide"
agcaaugguuuucaggaag

SEQ ID NO: 1136 - RNA, 19 nt, Artificial Sequence
  source: /note="Description of Artificial Sequence: Synthetic oligonucleotide"
gagcaaugguuuucaggaa

SEQ ID NO: 1137 - RNA, 19 nt, Artificial Sequence
  source: /note="Description of Artificial Sequence: Synthetic oligonucleotide"
agagcaaugguuuucagga

SEQ ID NO: 1138 - RNA, 19 nt, Artificial Sequence
  source: /note="Description of Artificial Sequence: Synthetic oligonucleotide"
aagagcaaugguuuucagg

SEQ ID NO: 1139 - RNA, 19 nt, Artificial Sequence
  source: /note="Description of Artificial Sequence: Synthetic oligonucleotide"
caagagcaaugguuuucag

SEQ ID NO: 1140 - RNA, 19 nt, Artificial Sequence
  source: /note="Description of Artificial Sequence: Synthetic oligonucleotide"
acaugcaagagcaaugguu

SEQ ID NO: 1141 - RNA, 19 nt, Artificial Sequence
  source: /note="Description of Artificial Sequence: Synthetic oligonucleotide"
uaacaugcaagagcaaugg

SEQ ID NO: 1142 - RNA, 19 nt, Artificial Sequence
  source: /note="Description of Artificial Sequence: Synthetic oligonucleotide"
guaacaugcaagagcaaug

SEQ ID NO: 1143 - RNA, 19 nt, Artificial Sequence
  source: /note="Description of Artificial Sequence: Synthetic oligonucleotide"
uguaacaugcaagagcaau

SEQ ID NO: 1144 - RNA, 19 nt, Artificial Sequence
  source: /note="Description of Artificial Sequence: Synthetic oligonucleotide"
auguaacaugcaagagcaa

SEQ ID NO: 1145 - RNA, 19 nt, Artificial Sequence
  source: /note="Description of Artificial Sequence: Synthetic oligonucleotide"
cauguaacaugcaagagca

SEQ ID NO: 1146 - RNA, 19 nt, Artificial Sequence
  source: /note="Description of Artificial Sequence: Synthetic oligonucleotide"
ccauguaacaugcaagagc

SEQ ID NO: 1147 - RNA, 19 nt, Artificial Sequence
  source: /note="Description of Artificial Sequence: Synthetic oligonucleotide"
accauguaacaugcaagag

SEQ ID NO: 1148 - RNA, 19 nt, Artificial Sequence
  source: /note="Description of Artificial Sequence: Synthetic oligonucleotide"
aaccauguaacaugcaaga

SEQ ID NO: 1149 - RNA, 19 nt, Artificial Sequence
  source: /note="Description of Artificial Sequence: Synthetic oligonucleotide"
uaaccauguaacaugcaag

SEQ ID NO: 1150 - RNA, 19 nt, Artificial Sequence
  source: /note="Description of Artificial Sequence: Synthetic oligonucleotide"
guaaccauguaacaugcaa

SEQ ID NO: 1151 - RNA, 19 nt, Artificial Sequence
  source: /note="Description of Artificial Sequence: Synthetic oligonucleotide"
gguaaccauguaacaugca

SEQ ID NO: 1152 - RNA, 19 nt, Artificial Sequence
  source: /note="Description of Artificial Sequence: Synthetic oligonucleotide"
ugguaaccauguaacaugc

SEQ ID NO: 1153 - RNA, 19 nt, Artificial Sequence
  source: /note="Description of Artificial Sequence: Synthetic oligonucleotide"
ugugguaaccauguaacau

SEQ ID NO: 1154 - RNA, 19 nt, Artificial Sequence
  source: /note="Description of Artificial Sequence: Synthetic oligonucleotide"
uugugguaaccauguaaca

SEQ ID NO: 1155 - RNA, 19 nt, Artificial Sequence
  source: /note="Description of Artificial Sequence: Synthetic oligonucleotide"
uuguggcuugugguaacca

SEQ ID NO: 1156 - RNA, 19 nt, Artificial Sequence
  source: /note="Description of Artificial Sequence: Synthetic oligonucleotide"
auuguggcuugugguaacc

SEQ ID NO: 1157 - RNA, 19 nt, Artificial Sequence
  source: /note="Description of Artificial Sequence: Synthetic oligonucleotide"
uauuguggcuugugguaac

SEQ ID NO: 1158 - RNA, 19 nt, Artificial Sequence
  source: /note="Description of Artificial Sequence: Synthetic oligonucleotide"
cuuuagaaguuaugcuuuu

SEQ ID NO: 1159 - RNA, 19 nt, Artificial Sequence
  source: /note="Description of Artificial Sequence: Synthetic oligonucleotide"
ccuuuagaaguuaugcuuu

SEQ ID NO: 1160 - RNA, 19 nt, Artificial Sequence
  source: /note="Description of Artificial Sequence: Synthetic oligonucleotide"
uccuuuagaaguuaugcuu

SEQ ID NO: 1161 - RNA, 19 nt, Artificial Sequence
  source: /note="Description of Artificial Sequence: Synthetic oligonucleotide"
uuccuuuagaaguuaugcu

SEQ ID NO: 1162 - RNA, 19 nt, Artificial Sequence
  source: /note="Description of Artificial Sequence: Synthetic oligonucleotide"
cuuccuuuagaaguuaugc

SEQ ID NO: 1163 - RNA, 19 nt, Artificial Sequence
  source: /note="Description of Artificial Sequence: Synthetic oligonucleotide"
gcuuccuuuagaaguuaug

SEQ ID NO: 1164 - RNA, 19 nt, Artificial Sequence
  source: /note="Description of Artificial Sequence: Synthetic oligonucleotide"
ugcuuccuuuagaaguuau

SEQ ID NO: 1165 - RNA, 19 nt, Artificial Sequence
  source: /note="Description of Artificial Sequence: Synthetic oligonucleotide"
uucugcuuccuuuagaagu

SEQ ID NO: 1166 - RNA, 19 nt, Artificial Sequence
  source: /note="Description of Artificial Sequence: Synthetic oligonucleotide"
uauucugcuuccuuuagaa

SEQ ID NO: 1167 - RNA, 19 nt, Artificial Sequence
  source: /note="Description of Artificial Sequence: Synthetic oligonucleotide"
cuauucugcuuccuuuaga

SEQ ID NO: 1168 - RNA, 19 nt, Artificial Sequence
  source: /note="Description of Artificial Sequence: Synthetic oligonucleotide"
gcuauucugcuuccuuuag

SEQ ID NO: 1169 - RNA, 19 nt, Artificial Sequence
  source: /note="Description of Artificial Sequence: Synthetic oligonucleotide"
gagcuauucugcuuccuuu

SEQ ID NO: 1170 - RNA, 19 nt, Artificial Sequence
  source: /note="Description of Artificial Sequence: Synthetic oligonucleotide"
guaaaugcaucuuacuuau

SEQ ID NO: 1171 - RNA, 19 nt, Artificial Sequence
  source: /note="Description of Artificial Sequence: Synthetic oligonucleotide"
aguaaaugcaucuuacuua

SEQ ID NO: 1172 - RNA, 19 nt, Artificial Sequence
  source: /note="Description of Artificial Sequence: Synthetic oligonucleotide"
uaguaaaugcaucuuacuu

SEQ ID NO: 1173 - RNA, 19 nt, Artificial Sequence
  source: /note="Description of Artificial Sequence: Synthetic oligonucleotide"
guaguaaaugcaucuuacu

SEQ ID NO: 1174 - RNA, 19 nt, Artificial Sequence
  source: /note="Description of Artificial Sequence: Synthetic oligonucleotide"
uguaguaaaugcaucuuac

SEQ ID NO: 1175 - RNA, 19 nt, Artificial Sequence
  source: /note="Description of Artificial Sequence: Synthetic oligonucleotide"
cuguaguaaaugcaucuua

SEQ ID NO: 1176 - RNA, 19 nt, Artificial Sequence
  source: /note="Description of Artificial Sequence: Synthetic oligonucleotide"
cugaagcauuagaagccaa

SEQ ID NO: 1177 - RNA, 19 nt, Artificial Sequence
  source: /note="Description of Artificial Sequence: Synthetic oligonucleotide"
ucugaagcauuagaagcca

SEQ ID NO: 1178 - RNA, 19 nt, Artificial Sequence
  source: /note="Description of Artificial Sequence: Synthetic oligonucleotide"
aucugaagcauuagaagcc

SEQ ID NO: 1179 - RNA, 19 nt, Artificial Sequence
  source: /note="Description of Artificial Sequence: Synthetic oligonucleotide"
uaucugaagcauuagaagc

SEQ ID NO: 1180 - RNA, 19 nt, Artificial Sequence
  source: /note="Description of Artificial Sequence: Synthetic oligonucleotide"
uucuaucugaagcauuaga

SEQ ID NO: 1181 - RNA, 19 nt, Artificial Sequence
  source: /note="Description of Artificial Sequence: Synthetic oligonucleotide"
auucuaucugaagcauuag

SEQ ID NO: 1182 - RNA, 19 nt, Artificial Sequence
  source: /note="Description of Artificial Sequence: Synthetic oligonucleotide"
uauucuaucugaagcauua

SEQ ID NO: 1183 - RNA, 19 nt, Artificial Sequence
  source: /note="Description of Artificial Sequence: Synthetic oligonucleotide"
guauucuaucugaagcauu

SEQ ID NO: 1184 - RNA, 19 nt, Artificial Sequence
  source: /note="Description of Artificial Sequence: Synthetic oligonucleotide"
uguauucuaucugaagcau

SEQ ID NO: 1185 - RNA, 19 nt, Artificial Sequence
  source: /note="Description of Artificial Sequence: Synthetic oligonucleotide"
cuguauucuaucugaagca

SEQ ID NO: 1186 - RNA, 19 nt, Artificial Sequence
  source: /note="Description of Artificial Sequence: Synthetic oligonucleotide"
acuguauucuaucugaagc

SEQ ID NO: 1187 - RNA, 19 nt, Artificial Sequence
  source: /note="Description of Artificial Sequence: Synthetic oligonucleotide"
aacuguauucuaucugaag

SEQ ID NO: 1188 - RNA, 19 nt, Artificial Sequence
  source: /note="Description of Artificial Sequence: Synthetic oligonucleotide"
caacuguauucuaucugaa

SEQ ID NO: 1189 - RNA, 19 nt, Artificial Sequence
  source: /note="Description of Artificial Sequence: Synthetic oligonucleotide"
ccaacuguauucuaucuga

SEQ ID NO: 1190 - RNA, 19 nt, Artificial Sequence
  source: /note="Description of Artificial Sequence: Synthetic oligonucleotide"
cccaacuguauucuaucug

SEQ ID NO: 1191 - RNA, 19 nt, Artificial Sequence
  source: /note="Description of Artificial Sequence: Synthetic oligonucleotide"
aaaauuuuauuucacaaug

SEQ ID NO: 1192 - RNA, 19 nt, Artificial Sequence
  source: /note="Description of Artificial Sequence: Synthetic oligonucleotide"
gaaaauuuuauuucacaau

SEQ ID NO: 1193 - RNA, 19 nt, Artificial Sequence
  source: /note="Description of Artificial Sequence: Synthetic oligonucleotide"
agaaaauuuuauuucacaa

SEQ ID NO: 1194 - RNA, 19 nt, Artificial Sequence
  source: /note="Description of Artificial Sequence: Synthetic oligonucleotide"
aagaaaauuuuauuucaca

SEQ ID NO: 1195 - RNA, 19 nt, Artificial Sequence
  source: /note="Description of Artificial Sequence: Synthetic oligonucleotide"
uaagaaaauuuuauuucac

SEQ ID NO: 1196 - RNA, 19 nt, Artificial Sequence
  source: /note="Description of Artificial Sequence: Synthetic oligonucleotide"
guaagaaaauuuuauuuca

SEQ ID NO: 1197 - RNA, 19 nt, Artificial Sequence
  source: /note="Description of Artificial Sequence: Synthetic oligonucleotide"
gguaagaaaauuuuauuuc

SEQ ID NO: 1198 - RNA, 19 nt, Artificial Sequence
  source: /note="Description of Artificial Sequence: Synthetic oligonucleotide"
ggguaagaaaauuuuauuu

SEQ ID NO: 1199 - RNA, 19 nt, Artificial Sequence
  source: /note="Description of Artificial Sequence: Synthetic oligonucleotide"
uggguaagaaaauuuuauu

SEQ ID NO: 1200 - RNA, 19 nt, Artificial Sequence
  source: /note="Description of Artificial Sequence: Synthetic oligonucleotide"
uuggguaagaaaauuuuau

SEQ ID NO: 1201 - RNA, 21 nt, Artificial Sequence
  source: /note="Description of Artificial Sequence: Synthetic oligonucleotide"
cagcacagcagagcuuuccaa

SEQ ID NO: 1202 - RNA, 21 nt, Artificial Sequence
  source: /note="Description of Artificial Sequence: Synthetic oligonucleotide"
agcacagcagagcuuuccaga

SEQ ID NO: 1203 - RNA, 21 nt, Artificial Sequence
  source: /note="Description of Artificial Sequence: Synthetic oligonucleotide"
agguucuucugugcacguuga

SEQ ID NO: 1204 - RNA, 21 nt, Artificial Sequence
  source: /note="Description of Artificial Sequence: Synthetic oligonucleotide"
gguucuucugugcacguugca

SEQ ID NO: 1205 - RNA, 21 nt, Artificial Sequence
  source: /note="Description of Artificial Sequence: Synthetic oligonucleotide"
gccagucccaaugaauccaga

SEQ ID NO: 1206 - RNA, 21 nt, Artificial Sequence
  source: /note="Description of Artificial Sequence: Synthetic oligonucleotide"
cagcuggaaacccaaaccaga

SEQ ID NO: 1207 - RNA, 21 nt, Artificial Sequence
  source: /note="Description of Artificial Sequence: Synthetic oligonucleotide"
uccgagacaagucaguucuga

SEQ ID NO: 1208 - RNA, 21 nt, Artificial Sequence
  source: /note="Description of Artificial Sequence: Synthetic oligonucleotide"
ccgagacaagucaguucugga

SEQ ID NO: 1209 - RNA, 21 nt, Artificial Sequence
  source: /note="Description of Artificial Sequence: Synthetic oligonucleotide"
aggcuccagagaaguuucuaa

SEQ ID NO: 1210 - RNA, 21 nt, Artificial Sequence
  source: /note="Description of Artificial Sequence: Synthetic oligonucleotide"
ggcuccagagaaguuucuaca

SEQ ID NO: 1211 - RNA, 21 nt, Artificial Sequence
  source: /note="Description of Artificial Sequence: Synthetic oligonucleotide"
guggaauuuggacacuuugga

SEQ ID NO: 1212 - RNA, 21 nt, Artificial Sequence
  source: /note="Description of Artificial Sequence: Synthetic oligonucleotide"
uggaauuuggacacuuuggca

SEQ ID NO: 1213 - RNA, 21 nt, Artificial Sequence
  source: /note="Description of Artificial Sequence: Synthetic oligonucleotide"
ggaauuuggacacuuuggcca

SEQ ID NO: 1214 - RNA, 21 nt, Artificial Sequence
  source: /note="Description of Artificial Sequence: Synthetic oligonucleotide"
gaauuuggacacuuuggccua

SEQ ID NO: 1215 - RNA, 21 nt, Artificial Sequence
  source: /note="Description of Artificial Sequence: Synthetic oligonucleotide"
ggacacuuuggccuuccagga

SEQ ID NO: 1216 - RNA, 21 nt, Artificial Sequence
  source: /note="Description of Artificial Sequence: Synthetic oligonucleotide"
uccaggaacugaaguccgaga

SEQ ID NO: 1217 - RNA, 21 nt, Artificial Sequence
  source: /note="Description of Artificial Sequence: Synthetic oligonucleotide"
guccgagcuaacugaaguuca

SEQ ID NO: 1218 - RNA, 21 nt, Artificial Sequence
  source: /note="Description of Artificial Sequence: Synthetic oligonucleotide"
uuccugcuucccgaauuuuga

SEQ ID NO: 1219 - RNA, 21 nt, Artificial Sequence
  source: /note="Description of Artificial Sequence: Synthetic oligonucleotide"
acugaaguccgagcuaacuga

SEQ ID NO: 1220 - RNA, 21 nt, Artificial Sequence
  source: /note="Description of Artificial Sequence: Synthetic oligonucleotide"
cgagcuaacugaaguuccuga

SEQ ID NO: 1221 - RNA, 21 nt, Artificial Sequence
  source: /note="Description of Artificial Sequence: Synthetic oligonucleotide"
acugaaguuccugcuucccga

SEQ ID NO: 1222 - RNA, 21 nt, Artificial Sequence
  source: /note="Description of Artificial Sequence: Synthetic oligonucleotide"
guuccugcuucccgaauuuua

SEQ ID NO: 1223 - RNA, 21 nt, Artificial Sequence
  source: /note="Description of Artificial Sequence: Synthetic oligonucleotide"
uccugcuucccgaauuuugaa

SEQ ID NO: 1224 - RNA, 21 nt, Artificial Sequence
  source: /note="Description of Artificial Sequence: Synthetic oligonucleotide"
ccugcuucccgaauuuugaaa

SEQ ID NO: 1225 - RNA, 21 nt, Artificial Sequence
  source: /note="Description of Artificial Sequence: Synthetic oligonucleotide"
cugcuucccgaauuuugaaga

SEQ ID NO: 1226 - RNA, 21 nt, Artificial Sequence
  source: /note="Description of Artificial Sequence: Synthetic oligonucleotide"
ugcuucccgaauuuugaagga

SEQ ID NO: 1227 - RNA, 21 nt, Artificial Sequence
  source: /note="Description of Artificial Sequence: Synthetic oligonucleotide"
cuucccgaauuuugaaggaga

SEQ ID NO: 1228 - RNA, 21 nt, Artificial Sequence
  source: /note="Description of Artificial Sequence: Synthetic oligonucleotide"
cggauguggagaacuaguuua

SEQ ID NO: 1229 - RNA, 21 nt, Artificial Sequence
  source: /note="Description of Artificial Sequence: Synthetic oligonucleotide"
ggauguggagaacuaguuuga

SEQ ID NO: 1230 - RNA, 21 nt, Artificial Sequence
  source: /note="Description of Artificial Sequence: Synthetic oligonucleotide"
gauguggagaacuaguuugga

SEQ ID NO: 1231 - RNA, 21 nt, Artificial Sequence
  source: /note="Description of Artificial Sequence: Synthetic oligonucleotide"
auguggagaacuaguuuggga

SEQ ID NO: 1232 - RNA, 21 nt, Artificial Sequence
  source: /note="Description of Artificial Sequence: Synthetic oligonucleotide"
uguggagaacuaguuugggua

SEQ ID NO: 1233 - RNA, 21 nt, Artificial Sequence
  source: /note="Description of Artificial Sequence: Synthetic oligonucleotide"
uggagaacuaguuuggguaga

SEQ ID NO: 1234 - RNA, 21 nt, Artificial Sequence
  source: /note="Description of Artificial Sequence: Synthetic oligonucleotide"
ggagaacuaguuuggguagga

SEQ ID NO: 1235 - RNA, 21 nt, Artificial Sequence
  source: /note="Description of Artificial Sequence: Synthetic oligonucleotide"
agaacuaguuuggguaggaga

SEQ ID NO: 1236 - RNA, 21 nt, Artificial Sequence
  source: /note="Description of Artificial Sequence: Synthetic oligonucleotide"
aacagcagaaacaauuacuga

SEQ ID NO: 1237 - RNA, 21 nt, Artificial Sequence
  source: /note="Description of Artificial Sequence: Synthetic oligonucleotide"
acagcagaaacaauuacugga

SEQ ID NO: 1238 - RNA, 21 nt, Artificial Sequence
  source: /note="Description of Artificial Sequence: Synthetic oligonucleotide"
aacaauuacuggcaaguauga

SEQ ID NO: 1239 - RNA, 21 nt, Artificial Sequence
  source: /note="Description of Artificial Sequence: Synthetic oligonucleotide"
acaauuacuggcaaguaugga

SEQ ID NO: 1240 - RNA, 21 nt, Artificial Sequence
  source: /note="Description of Artificial Sequence: Synthetic oligonucleotide"
caauuacuggcaaguauggua

SEQ ID NO: 1241 - RNA, 21 nt, Artificial Sequence
  source: /note="Description of Artificial Sequence: Synthetic oligonucleotide"
aauuacuggcaaguaugguga

SEQ ID NO: 1242 - RNA, 21 nt, Artificial Sequence
  source: /note="Description of Artificial Sequence: Synthetic oligonucleotide"
auuacuggcaaguauggugua

SEQ ID NO: 1243 - RNA, 21 nt, Artificial Sequence
  source: /note="Description of Artificial Sequence: Synthetic oligonucleotide"
uuacuggcaaguaugguguga

SEQ ID NO: 1244 - RNA, 21 nt, Artificial Sequence
  source: /note="Description of Artificial Sequence: Synthetic oligonucleotide"
guaugguguguggaugcgaga

SEQ ID NO: 1245 - RNA, 21 nt, Artificial Sequence
  source: /note="Description of Artificial Sequence: Synthetic oligonucleotide"
gauguccgccagguuuuugaa

SEQ ID NO: 1246 - RNA, 21 nt, Artificial Sequence
  source: /note="Description of Artificial Sequence: Synthetic oligonucleotide"
ccgccagguuuuugaguauga

SEQ ID NO: 1247 - RNA, 21 nt, Artificial Sequence
  source: /note="Description of Artificial Sequence: Synthetic oligonucleotide"
gaccucaucagccaguuuaua

SEQ ID NO: 1248 - RNA, 21 nt, Artificial Sequence
  source: /note="Description of Artificial Sequence: Synthetic oligonucleotide"
uuugaguaugaccucaucaga

SEQ ID NO: 1249 - RNA, 21 nt, Artificial Sequence
  source: /note="Description of Artificial Sequence: Synthetic oligonucleotide"
accucaucagccaguuuauga

SEQ ID NO: 1250 - RNA, 21 nt, Artificial Sequence
  source: /note="Description of Artificial Sequence: Synthetic oligonucleotide"
ccucaucagccaguuuaugca

SEQ ID NO: 1251 - RNA, 21 nt, Artificial Sequence
  source: /note="Description of Artificial Sequence: Synthetic oligonucleotide"
ucaucagccaguuuaugcaga

SEQ ID NO: 1252 - RNA, 21 nt, Artificial Sequence
  source: /note="Description of Artificial Sequence: Synthetic oligonucleotide"
gcagggcuacccuucuaagga

SEQ ID NO: 1253 - RNA, 21 nt, Artificial Sequence
  source: /note="Description of Artificial Sequence: Synthetic oligonucleotide"
cagggcuacccuucuaaggua

SEQ ID NO: 1254 - RNA, 21 nt, Artificial Sequence
  source: /note="Description of Artificial Sequence: Synthetic oligonucleotide"
gggcuacccuucuaagguuca

SEQ ID NO: 1255 - RNA, 21 nt, Artificial Sequence
  source: /note="Description of Artificial Sequence: Synthetic oligonucleotide"
cuucuaagguucacauacuga

SEQ ID NO: 1256 - RNA, 21 nt, Artificial Sequence
  source: /note="Description of Artificial Sequence: Synthetic oligonucleotide"
uucuaagguucacauacugca

SEQ ID NO: 1257 - RNA, 21 nt, Artificial Sequence
  source: /note="Description of Artificial Sequence: Synthetic oligonucleotide"
gaguccagaacugucauaaga

SEQ ID NO: 1258 - RNA, 21 nt, Artificial Sequence
  source: /note="Description of Artificial Sequence: Synthetic oligonucleotide"
guccagaacugucauaagaua

SEQ ID NO: 1259 - RNA, 21 nt, Artificial Sequence
  source: /note="Description of Artificial Sequence: Synthetic oligonucleotide"
cagaacugucauaagauauga

SEQ ID NO: 1260 - RNA, 21 nt, Artificial Sequence
  source: /note="Description of Artificial Sequence: Synthetic oligonucleotide"
agaacugucauaagauaugaa

SEQ ID NO: 1261 - RNA, 21 nt, Artificial Sequence
  source: /note="Description of Artificial Sequence: Synthetic oligonucleotide"
gaacugucauaagauaugaga

SEQ ID NO: 1262 - RNA, 21 nt, Artificial Sequence
  source: /note="Description of Artificial Sequence: Synthetic oligonucleotide"
aacugucauaagauaugagca

SEQ ID NO: 1263 - RNA, 21 nt, Artificial Sequence
  source: /note="Description of Artificial Sequence: Synthetic oligonucleotide"
aagauaugagcugaauaccga

SEQ ID NO: 1264 - RNA, 21 nt, Artificial Sequence
  source: /note="Description of Artificial Sequence: Synthetic oligonucleotide"
agauaugagcugaauaccgaa

SEQ ID NO: 1265 - RNA, 21 nt, Artificial Sequence
  source: /note="Description of Artificial Sequence: Synthetic oligonucleotide"
gauaugagcugaauaccgaga

SEQ ID NO: 1266 - RNA, 21 nt, Artificial Sequence
  source: /note="Description of Artificial Sequence: Synthetic oligonucleotide"
ugaauaccgagacagugaaga

SEQ ID NO: 1267 - RNA, 21 nt, Artificial Sequence
  source: /note="Description of Artificial Sequence: Synthetic oligonucleotide"
gaauaccgagacagugaagga

SEQ ID NO: 1268 - RNA, 21 nt, Artificial Sequence
  source: /note="Description of Artificial Sequence: Synthetic oligonucleotide"
ccacggacaguucccguauua

SEQ ID NO: 1269 - RNA, 21 nt, Artificial Sequence
  source: /note="Description of Artificial Sequence: Synthetic oligonucleotide"
cacggacaguucccguauuca

SEQ ID NO: 1270 - RNA, 21 nt, Artificial Sequence
  source: /note="Description of Artificial Sequence: Synthetic oligonucleotide"
acggacaguucccguauucua

SEQ ID NO: 1271 - RNA, 21 nt, Artificial Sequence
  source: /note="Description of Artificial Sequence: Synthetic oligonucleotide"
accacggacaguucccguaua

SEQ ID NO: 1272 - RNA, 21 nt, Artificial Sequence
  source: /note="Description of Artificial Sequence: Synthetic oligonucleotide"
cggacaguucccguauucuua

SEQ ID NO: 1273 - RNA, 21 nt, Artificial Sequence
  source: /note="Description of Artificial Sequence: Synthetic oligonucleotide"
ggacaguucccguauucuuga

SEQ ID NO: 1274 - RNA, 21 nt, Artificial Sequence
  source: /note="Description of Artificial Sequence: Synthetic oligonucleotide"
gacaguucccguauucuugga

SEQ ID NO: 1275 - RNA, 21 nt, Artificial Sequence
  source: /note="Description of Artificial Sequence: Synthetic oligonucleotide"
caggccucugggucauuuaca

SEQ ID NO: 1276 - RNA, 21 nt, Artificial Sequence
  source: /note="Description of Artificial Sequence: Synthetic oligonucleotide"
aggccucugggucauuuacaa

SEQ ID NO: 1277 - RNA, 21 nt, Artificial Sequence
  source: /note="Description of Artificial Sequence: Synthetic oligonucleotide"
ggccucugggucauuuacaga

SEQ ID NO: 1278 - RNA, 21 nt, Artificial Sequence
  source: /note="Description of Artificial Sequence: Synthetic oligonucleotide"
aggccaaaggugccauuguca

SEQ ID NO: 1279 - RNA, 21 nt, Artificial Sequence
  source: /note="Description of Artificial Sequence: Synthetic oligonucleotide"
ccauuguccucuccaaacuga

SEQ ID NO: 1280 - RNA, 21 nt, Artificial Sequence
  source: /note="Description of Artificial Sequence: Synthetic oligonucleotide"
gucgccaaugccuucaucaua

SEQ ID NO: 1281 - RNA, 21 nt, Artificial Sequence
  source: /note="Description of Artificial Sequence: Synthetic oligonucleotide"
uaccgucaacuuugcuuauga

SEQ ID NO: 1282 - RNA, 21 nt, Artificial Sequence
  source: /note="Description of Artificial Sequence: Synthetic oligonucleotide"
accgucaacuuugcuuaugaa

SEQ ID NO: 1283 - RNA, 21 nt, Artificial Sequence
  source: /note="Description of Artificial Sequence: Synthetic oligonucleotide"
ccgucaacuuugcuuaugaca

SEQ ID NO: 1284 - RNA, 21 nt, Artificial Sequence
  source: /note="Description of Artificial Sequence: Synthetic oligonucleotide"
uaugacacaggcacagguaua

SEQ ID NO: 1285 - RNA, 21 nt, Artificial Sequence
  source: /note="Description of Artificial Sequence: Synthetic oligonucleotide"
acccugaccaucccauucaaa

SEQ ID NO: 1286 - RNA, 21 nt, Artificial Sequence
  source: /note="Description of Artificial Sequence: Synthetic oligonucleotide"
caucccauucaagaaccgcua

SEQ ID NO: 1287 - RNA, 21 nt, Artificial Sequence
  source: /note="Description of Artificial Sequence: Synthetic oligonucleotide"
cccugaccaucccauucaaga

SEQ ID NO: 1288 - RNA, 21 nt, Artificial Sequence
  source: /note="Description of Artificial Sequence: Synthetic oligonucleotide"
accaucccauucaagaaccga

SEQ ID NO: 1289 - RNA, 21 nt, Artificial Sequence
  source: /note="Description of Artificial Sequence: Synthetic oligonucleotide"
ccaucccauucaagaaccgca

SEQ ID NO: 1290 - RNA, 21 nt, Artificial Sequence
  source: /note="Description of Artificial Sequence: Synthetic oligonucleotide"
uaaguacagcagcaugauuga

SEQ ID NO: 1291 - RNA, 21 nt, Artificial Sequence
  source: /note="Description of Artificial Sequence: Synthetic oligonucleotide"
aaguacagcagcaugauugaa

SEQ ID NO: 1292 - RNA, 21 nt, Artificial Sequence
  source: /note="Description of Artificial Sequence: Synthetic oligonucleotide"
guacagcagcaugauugacua

SEQ ID NO: 1293 - RNA, 21 nt, Artificial Sequence
  source: /note="Description of Artificial Sequence: Synthetic oligonucleotide"
ucuuugccugggacaacuuga

SEQ ID NO: 1294 - RNA, 21 nt, Artificial Sequence
  source: /note="Description of Artificial Sequence: Synthetic oligonucleotide"
cuugaacauggucacuuauga

SEQ ID NO: 1295 - RNA, 21 nt, Artificial Sequence
  source: /note="Description of Artificial Sequence: Synthetic oligonucleotide"
uugaacauggucacuuaugaa

SEQ ID NO: 1296 - RNA, 21 nt, Artificial Sequence
  source: /note="Description of Artificial Sequence: Synthetic oligonucleotide"
ugaacauggucacuuaugaca

SEQ ID NO: 1297 - RNA, 21 nt, Artificial Sequence
  source: /note="Description of Artificial Sequence: Synthetic oligonucleotide"
aucaagcucuccaagauguga

SEQ ID NO: 1298 - RNA, 21 nt, Artificial Sequence
  source: /note="Description of Artificial Sequence: Synthetic oligonucleotide"
ucaagcucuccaagaugugaa

SEQ ID NO: 1299 - RNA, 21 nt, Artificial Sequence
  source: /note="Description of Artificial Sequence: Synthetic oligonucleotide"
uucaggaauuguagucugaga

SEQ ID NO: 1300 - RNA, 21 nt, Artificial Sequence
  source: /note="Description of Artificial Sequence: Synthetic oligonucleotide"
uaucuucugucagcauuuaua

SEQ ID NO: 1301 - RNA, 21 nt, Artificial Sequence
  source: /note="Description of Artificial Sequence: Synthetic oligonucleotide"
aucuucugucagcauuuauga

SEQ ID NO: 1302 - RNA, 21 nt, Artificial Sequence
  source: /note="Description of Artificial Sequence: Synthetic oligonucleotide"
ucuucugucagcauuuaugga

SEQ ID NO: 1303 - RNA, 21 nt, Artificial Sequence
  source: /note="Description of Artificial Sequence: Synthetic oligonucleotide"
cuucugucagcauuuauggga

SEQ ID NO: 1304 - RNA, 21 nt, Artificial Sequence
  source: /note="Description of Artificial Sequence: Synthetic oligonucleotide"
ucugucagcauuuaugggaua

SEQ ID NO: 1305 - RNA, 21 nt, Artificial Sequence
  source: /note="Description of Artificial Sequence: Synthetic oligonucleotide"
cugucagcauuuaugggauga

SEQ ID NO: 1306 - RNA, 21 nt, Artificial Sequence
  source: /note="Description of Artificial Sequence: Synthetic oligonucleotide"
cauuuaugggauguuuaauga

SEQ ID NO: 1307 - RNA, 21 nt, Artificial Sequence
  source: /note="Description of Artificial Sequence: Synthetic oligonucleotide"
auuuaugggauguuuaaugaa

SEQ ID NO: 1308 - RNA, 21 nt, Artificial Sequence
  source: /note="Description of Artificial Sequence: Synthetic oligonucleotide"
uuuaugggauguuuaaugaca

SEQ ID NO: 1309 - RNA, 21 nt, Artificial Sequence
  source: /note="Description of Artificial Sequence: Synthetic oligonucleotide"
gauguuuaaugacauaguuca

SEQ ID NO: 1310 - RNA, 21 nt, Artificial Sequence
  source: /note="Description of Artificial Sequence: Synthetic oligonucleotide"
ugacauaguucaaguuuucua

SEQ ID NO: 1311 - RNA, 21 nt, Artificial Sequence
  source: /note="Description of Artificial Sequence: Synthetic oligonucleotide"
gacauaguucaaguuuucuua

SEQ ID NO: 1312 - RNA, 21 nt, Artificial Sequence
  source: /note="Description of Artificial Sequence: Synthetic oligonucleotide"
acauaguucaaguuuucuuga

SEQ ID NO: 1313 - RNA, 21 nt, Artificial Sequence
  source: /note="Description of Artificial Sequence: Synthetic oligonucleotide"
ucuuccugaaaaccauugcua

SEQ ID NO: 1314 - RNA, 21 nt, Artificial Sequence
  source: /note="Description of Artificial Sequence: Synthetic oligonucleotide"
cauaguucaaguuuucuugua

SEQ ID NO: 1315 - RNA, 21 nt, Artificial Sequence
  source: /note="Description of Artificial Sequence: Synthetic oligonucleotide"
auaguucaaguuuucuuguga

SEQ ID NO: 1316 - RNA, 21 nt, Artificial Sequence
  source: /note="Description of Artificial Sequence: Synthetic oligonucleotide"
uaguucaaguuuucuugugaa

SEQ ID NO: 1317 - RNA, 21 nt, Artificial Sequence
  source: /note="Description of Artificial Sequence: Synthetic oligonucleotide"
aguucaaguuuucuugugaua

SEQ ID NO: 1318 - RNA, 21 nt, Artificial Sequence
  source: /note="Description of Artificial Sequence: Synthetic oligonucleotide"
ucaaguuuucuugugauuuga

SEQ ID NO: 1319 - RNA, 21 nt, Artificial Sequence
  source: /note="Description of Artificial Sequence: Synthetic oligonucleotide"
gaaaaccauugcucuugcaua

SEQ ID NO: 1320 - RNA, 21 nt, Artificial Sequence
  source: /note="Description of Artificial Sequence: Synthetic oligonucleotide"
aaaaccauugcucuugcauga

SEQ ID NO: 1321 - RNA, 21 nt, Artificial Sequence
  source: /note="Description of Artificial Sequence: Synthetic oligonucleotide"
auugcucuugcauguuacaua

SEQ ID NO: 1322 - RNA, 21 nt, Artificial Sequence
  source: /note="Description of Artificial Sequence: Synthetic oligonucleotide"
uugcucuugcauguuacauga

SEQ ID NO: 1323 - RNA, 21 nt, Artificial Sequence
  source: /note="Description of Artificial Sequence: Synthetic oligonucleotide"
cuugcauguuacaugguuaca

SEQ ID NO: 1324 - RNA, 21 nt, Artificial Sequence
  source: /note="Description of Artificial Sequence: Synthetic oligonucleotide"
cucuugcauguuacaugguua

SEQ ID NO: 1325 - RNA, 21 nt, Artificial Sequence
  source: /note="Description of Artificial Sequence: Synthetic oligonucleotide"
ucuugcauguuacaugguuaa

SEQ ID NO: 1326 - RNA, 21 nt, Artificial Sequence
  source: /note="Description of Artificial Sequence: Synthetic oligonucleotide"
aaaagcauaacuucuaaagga

SEQ ID NO: 1327 - RNA, 21 nt, Artificial Sequence
  source: /note="Description of Artificial Sequence: Synthetic oligonucleotide"
aaagcauaacuucuaaaggaa

SEQ ID NO: 1328 - RNA, 21 nt, Artificial Sequence
  source: /note="Description of Artificial Sequence: Synthetic oligonucleotide"
ucuaaaggaagcagaauagca

SEQ ID NO: 1329 - RNA, 21 nt, Artificial Sequence
  source: /note="Description of Artificial Sequence: Synthetic oligonucleotide"
cuaaaggaagcagaauagcua

SEQ ID NO: 1330 - RNA, 21 nt, Artificial Sequence
  source: /note="Description of Artificial Sequence: Synthetic oligonucleotide"
aaguaagaugcauuuacuaca

SEQ ID NO: 1331 - RNA, 21 nt, Artificial Sequence
  source: /note="Description of Artificial Sequence: Synthetic oligonucleotide"
uucagauagaauacaguugga

SEQ ID NO: 1332 - RNA, 21 nt, Artificial Sequence
  source: /note="Description of Artificial Sequence: Synthetic oligonucleotide"
guuggcuucuaaugcuucaga

SEQ ID NO: 1333 - RNA, 21 nt, Artificial Sequence
  source: /note="Description of Artificial Sequence: Synthetic oligonucleotide"
ucuaaugcuucagauagaaua

SEQ ID NO: 1334 - RNA, 21 nt, Artificial Sequence
  source: /note="Description of Artificial Sequence: Synthetic oligonucleotide"
augcuucagauagaauacaga

SEQ ID NO: 1335 - RNA, 21 nt, Artificial Sequence
  source: /note="Description of Artificial Sequence: Synthetic oligonucleotide"
cuucagauagaauacaguuga

SEQ ID NO: 1336 - RNA, 23 nt, Artificial Sequence
  source: /note="Description of Artificial Sequence: Synthetic oligonucleotide"
uuggaaagcucugcugugcugag

SEQ ID NO: 1337 - RNA, 23 nt, Artificial Sequence
  source: /note="Description of Artificial Sequence: Synthetic oligonucleotide"
ucuggaaagcucugcugugcuga

SEQ ID NO: 1338 - RNA, 23 nt, Artificial Sequence
  source: /note="Description of Artificial Sequence: Synthetic oligonucleotide"
ucaacgugcacagaagaaccuca

SEQ ID NO: 1339 - RNA, 23 nt, Artificial Sequence
  source: /note="Description of Artificial Sequence: Synthetic oligonucleotide"
ugcaacgugcacagaagaaccuc

SEQ ID NO: 1340 - RNA, 23 nt, Artificial Sequence
  source: /note="Description of Artificial Sequence: Synthetic oligonucleotide"
ucuggauucauugggacuggcca

SEQ ID NO: 1341 - RNA, 23 nt, Artificial Sequence
  source: /note="Description of Artificial Sequence: Synthetic oligonucleotide"
ucugguuuggguuuccagcuggu

SEQ ID NO: 1342 - RNA, 23 nt, Artificial Sequence
  source: /note="Description of Artificial Sequence: Synthetic oligonucleotide"
ucagaacugacuugucucggagg

SEQ ID NO: 1343 - RNA, 23 nt, Artificial Sequence
  source: /note="Description of Artificial Sequence: Synthetic oligonucleotide"
uccagaacugacuugucucggag

SEQ ID NO: 1344 - RNA, 23 nt, Artificial Sequence
  source: /note="Description of Artificial Sequence: Synthetic oligonucleotide"
uuagaaacuucucuggagccugg

SEQ ID NO: 1345 - RNA, 23 nt, Artificial Sequence
  source: /note="Description of Artificial Sequence: Synthetic oligonucleotide"
uguagaaacuucucuggagccug

SEQ ID NO: 1346 - RNA, 23 nt, Artificial Sequence
  source: /note="Description of Artificial Sequence: Synthetic oligonucleotide"
uccaaaguguccaaauuccacgu

SEQ ID NO: 1347 - RNA, 23 nt, Artificial Sequence
  source: /note="Description of Artificial Sequence: Synthetic oligonucleotide"
ugccaaaguguccaaauuccacg

SEQ ID NO: 1348 - RNA, 23 nt, Artificial Sequence
  source: /note="Description of Artificial Sequence: Synthetic oligonucleotide"
uggccaaaguguccaaauuccac

SEQ ID NO: 1349 - RNA, 23 nt, Artificial Sequence
  source: /note="Description of Artificial Sequence: Synthetic oligonucleotide"
uaggccaaaguguccaaauucca

SEQ ID NO: 1350 - RNA, 23 nt, Artificial Sequence
  source: /note="Description of Artificial Sequence: Synthetic oligonucleotide"
uccuggaaggccaaaguguccaa

SEQ ID NO: 1351 - RNA, 23 nt, Artificial Sequence
  source: /note="Description of Artificial Sequence: Synthetic oligonucleotide"
ucucggacuucaguuccuggaag

SEQ ID NO: 1352 - RNA, 23 nt, Artificial Sequence
  source: /note="Description of Artificial Sequence: Synthetic oligonucleotide"
ugaacuucaguuagcucggacuu

SEQ ID NO: 1353 - RNA, 23 nt, Artificial Sequence
  source: /note="Description of Artificial Sequence: Synthetic oligonucleotide"
ucaaaauucgggaagcaggaacu

SEQ ID NO: 1354 - RNA, 23 nt, Artificial Sequence
  source: /note="Description of Artificial Sequence: Synthetic oligonucleotide"
ucaguuagcucggacuucaguuc

SEQ ID NO: 1355 - RNA, 23 nt, Artificial Sequence
  source: /note="Description of Artificial Sequence: Synthetic oligonucleotide"
ucaggaacuucaguuagcucgga

SEQ ID NO: 1356 - RNA, 23 nt, Artificial Sequence
  source: /note="Description of Artificial Sequence: Synthetic oligonucleotide"
ucgggaagcaggaacuucaguua

SEQ ID NO: 1357 - RNA, 23 nt, Artificial Sequence
  source: /note="Description of Artificial Sequence: Synthetic oligonucleotide"
uaaaauucgggaagcaggaacuu

SEQ ID NO: 1358 - RNA, 23 nt, Artificial Sequence
  source: /note="Description of Artificial Sequence: Synthetic oligonucleotide"
uucaaaauucgggaagcaggaac

SEQ ID NO: 1359 - RNA, 23 nt, Artificial Sequence
  source: /note="Description of Artificial Sequence: Synthetic oligonucleotide"
uuucaaaauucgggaagcaggaa

SEQ ID NO: 1360 - RNA, 23 nt, Artificial Sequence
  source: /note="Description of Artificial Sequence: Synthetic oligonucleotide"
ucuucaaaauucgggaagcagga

SEQ ID NO: 1361 - RNA, 23 nt, Artificial Sequence
  source: /note="Description of Artificial Sequence: Synthetic oligonucleotide"
uccuucaaaauucgggaagcagg

SEQ ID NO: 1362 - RNA, 23 nt, Artificial Sequence
  source: /note="Description of Artificial Sequence: Synthetic oligonucleotide"
ucuccuucaaaauucgggaagca

SEQ ID NO: 1363 - RNA, 23 nt, Artificial Sequence
  source: /note="Description of Artificial Sequence: Synthetic oligonucleotide"
uaaacuaguucuccacauccggu

SEQ ID NO: 1364 - RNA, 23 nt, Artificial Sequence
  source: /note="Description of Artificial Sequence: Synthetic oligonucleotide"
ucaaacuaguucuccacauccgg

SEQ ID NO: 1365 - RNA, 23 nt, Artificial Sequence
  source: /note="Description of Artificial Sequence: Synthetic oligonucleotide"
uccaaacuaguucuccacauccg

SEQ ID NO: 1366 - RNA, 23 nt, Artificial Sequence
  source: /note="Description of Artificial Sequence: Synthetic oligonucleotide"
ucccaaacuaguucuccacaucc

SEQ ID NO: 1367 - RNA, 23 nt, Artificial Sequence
  source: /note="Description of Artificial Sequence: Synthetic oligonucleotide"
uacccaaacuaguucuccacauc

SEQ ID NO: 1368 - RNA, 23 nt, Artificial Sequence
  source: /note="Description of Artificial Sequence: Synthetic oligonucleotide"
ucuacccaaacuaguucuccaca

SEQ ID NO: 1369 - RNA, 23 nt, Artificial Sequence
  source: /note="Description of Artificial Sequence: Synthetic oligonucleotide"
uccuacccaaacuaguucuccac

SEQ ID NO: 1370 - RNA, 23 nt, Artificial Sequence
  source: /note="Description of Artificial Sequence: Synthetic oligonucleotide"
ucuccuacccaaacuaguucucc

SEQ ID NO: 1371 - RNA, 23 nt, Artificial Sequence
  source: /note="Description of Artificial Sequence: Synthetic oligonucleotide"
ucaguaauuguuucugcuguucu

SEQ ID NO: 1372 - RNA, 23 nt, Artificial Sequence
  source: /note="Description of Artificial Sequence: Synthetic oligonucleotide"
uccaguaauuguuucugcuguuc

SEQ ID NO: 1373 - RNA, 23 nt, Artificial Sequence
  source: /note="Description of Artificial Sequence: Synthetic oligonucleotide"
ucauacuugccaguaauuguuuc

SEQ ID NO: 1374 - RNA, 23 nt, Artificial Sequence
  source: /note="Description of Artificial Sequence: Synthetic oligonucleotide"
uccauacuugccaguaauuguuu

SEQ ID NO: 1375 - RNA, 23 nt, Artificial Sequence
  source: /note="Description of Artificial Sequence: Synthetic oligonucleotide"
uaccauacuugccaguaauuguu

SEQ ID NO: 1376 - RNA, 23 nt, Artificial Sequence
  source: /note="Description of Artificial Sequence: Synthetic oligonucleotide"
ucaccauacuugccaguaauugu

SEQ ID NO: 1377 - RNA, 23 nt, Artificial Sequence
  source: /note="Description of Artificial Sequence: Synthetic oligonucleotide"
uacaccauacuugccaguaauug

SEQ ID NO: 1378 - RNA, 23 nt, Artificial Sequence
  source: /note="Description of Artificial Sequence: Synthetic oligonucleotide"
ucacaccauacuugccaguaauu

SEQ ID NO: 1379 - RNA, 23 nt, Artificial Sequence
  source: /note="Description of Artificial Sequence: Synthetic oligonucleotide"
ucucgcauccacacaccauacuu

SEQ ID NO: 1380 - RNA, 23 nt, Artificial Sequence
  source: /note="Description of Artificial Sequence: Synthetic oligonucleotide"
uucaaaaaccuggcggacauccg

SEQ ID NO: 1381 - RNA, 23 nt, Artificial Sequence
  source: /note="Description of Artificial Sequence: Synthetic oligonucleotide"
ucauacucaaaaaccuggcggac

SEQ ID NO: 1382 - RNA, 23 nt, Artificial Sequence
  source: /note="Description of Artificial Sequence: Synthetic oligonucleotide"
uauaaacuggcugaugaggucau

SEQ ID NO: 1383 - RNA, 23 nt, Artificial Sequence
  source: /note="Description of Artificial Sequence: Synthetic oligonucleotide"
ucugaugaggucauacucaaaaa

SEQ ID NO: 1384 - RNA, 23 nt, Artificial Sequence
  source: /note="Description of Artificial Sequence: Synthetic oligonucleotide"
ucauaaacuggcugaugagguca

SEQ ID NO: 1385 - RNA, 23 nt, Artificial Sequence
  source: /note="Description of Artificial Sequence: Synthetic oligonucleotide"
ugcauaaacuggcugaugagguc

SEQ ID NO: 1386 - RNA, 23 nt, Artificial Sequence
  source: /note="Description of Artificial Sequence: Synthetic oligonucleotide"
ucugcauaaacuggcugaugagg

SEQ ID NO: 1387 - RNA, 23 nt, Artificial Sequence
  source: /note="Description of Artificial Sequence: Synthetic oligonucleotide"
uccuuagaaggguagcccugcau

SEQ ID NO: 1388 - RNA, 23 nt, Artificial Sequence
  source: /note="Description of Artificial Sequence: Synthetic oligonucleotide"
uaccuuagaaggguagcccugca

SEQ ID NO: 1389 - RNA, 23 nt, Artificial Sequence
  source: /note="Description of Artificial Sequence: Synthetic oligonucleotide"
ugaaccuuagaaggguagcccug

SEQ ID NO: 1390 - RNA, 23 nt, Artificial Sequence
  source: /note="Description of Artificial Sequence: Synthetic oligonucleotide"
ucaguaugugaaccuuagaaggg

SEQ ID NO: 1391 - RNA, 23 nt, Artificial Sequence
  source: /note="Description of Artificial Sequence: Synthetic oligonucleotide"
ugcaguaugugaaccuuagaagg

SEQ ID NO: 1392 - RNA, 23 nt, Artificial Sequence
  source: /note="Description of Artificial Sequence: Synthetic oligonucleotide"
ucuuaugacaguucuggacucag

SEQ ID NO: 1393 - RNA, 23 nt, Artificial Sequence
  source: /note="Description of Artificial Sequence: Synthetic oligonucleotide"
uaucuuaugacaguucuggacuc

SEQ ID NO: 1394 - RNA, 23 nt, Artificial Sequence
  source: /note="Description of Artificial Sequence: Synthetic oligonucleotide"
ucauaucuuaugacaguucugga

SEQ ID NO: 1395 - RNA, 23 nt, Artificial Sequence
  source: /note="Description of Artificial Sequence: Synthetic oligonucleotide"
uucauaucuuaugacaguucugg

SEQ ID NO: 1396 - RNA, 23 nt, Artificial Sequence
  source: /note="Description of Artificial Sequence: Synthetic oligonucleotide"
ucucauaucuuaugacaguucug

SEQ ID NO: 1397 - RNA, 23 nt, Artificial Sequence
  source: /note="Description of Artificial Sequence: Synthetic oligonucleotide"
ugcucauaucuuaugacaguucu

SEQ ID NO: 1398 - RNA, 23 nt, Artificial Sequence
  source: /note="Description of Artificial Sequence: Synthetic oligonucleotide"
ucgguauucagcucauaucuuau

SEQ ID NO: 1399 - RNA, 23 nt, Artificial Sequence
  source: /note="Description of Artificial Sequence: Synthetic oligonucleotide"
uucgguauucagcucauaucuua

SEQ ID NO: 1400 - RNA, 23 nt, Artificial Sequence
  source: /note="Description of Artificial Sequence: Synthetic oligonucleotide"
ucucgguauucagcucauaucuu

SEQ ID NO: 1401 - RNA, 23 nt, Artificial Sequence
  source: /note="Description of Artificial Sequence: Synthetic oligonucleotide"
ucuucacugucucgguauucagc

SEQ ID NO: 1402 - RNA, 23 nt, Artificial Sequence
  source: /note="Description of Artificial Sequence: Synthetic oligonucleotide"
uccuucacugucucgguauucag

SEQ ID NO: 1403 - RNA, 23 nt, Artificial Sequence
  source: /note="Description of Artificial Sequence: Synthetic oligonucleotide"
uaauacgggaacuguccguggua

SEQ ID NO: 1404 - RNA, 23 nt, Artificial Sequence
  source: /note="Description of Artificial Sequence: Synthetic oligonucleotide"
ugaauacgggaacuguccguggu

SEQ ID NO: 1405 - RNA, 23 nt, Artificial Sequence
  source: /note="Description of Artificial Sequence: Synthetic oligonucleotide"
uagaauacgggaacuguccgugg

SEQ ID NO: 1406 - RNA, 23 nt, Artificial Sequence
  source: /note="Description of Artificial Sequence: Synthetic oligonucleotide"
uauacgggaacuguccgugguag

SEQ ID NO: 1407 - RNA, 23 nt, Artificial Sequence
  source: /note="Description of Artificial Sequence: Synthetic oligonucleotide"
uaagaauacgggaacuguccgug

SEQ ID NO: 1408 - RNA, 23 nt, Artificial Sequence
  source: /note="Description of Artificial Sequence: Synthetic oligonucleotide"
ucaagaauacgggaacuguccgu

SEQ ID NO: 1409 - RNA, 23 nt, Artificial Sequence
  source: /note="Description of Artificial Sequence: Synthetic oligonucleotide"
uccaagaauacgggaacuguccg

SEQ ID NO: 1410 - RNA, 23 nt, Artificial Sequence
  source: /note="Description of Artificial Sequence: Synthetic oligonucleotide"
uguaaaugacccagaggccugcu

SEQ ID NO: 1411 - RNA, 23 nt, Artificial Sequence
  source: /note="Description of Artificial Sequence: Synthetic oligonucleotide"
uuguaaaugacccagaggccugc

SEQ ID NO: 1412 - RNA, 23 nt, Artificial Sequence
  source: /note="Description of Artificial Sequence: Synthetic oligonucleotide"
ucuguaaaugacccagaggccug

SEQ ID NO: 1413 - RNA, 23 nt, Artificial Sequence
  source: /note="Description of Artificial Sequence: Synthetic oligonucleotide"
ugacaauggcaccuuuggccuca

SEQ ID NO: 1414 - RNA, 23 nt, Artificial Sequence
  source: /note="Description of Artificial Sequence: Synthetic oligonucleotide"
ucaguuuggagaggacaauggca

SEQ ID NO: 1415 - RNA, 23 nt, Artificial Sequence
  source: /note="Description of Artificial Sequence: Synthetic oligonucleotide"
uaugaugaaggcauuggcgacug

SEQ ID NO: 1416 - RNA, 23 nt, Artificial Sequence
  source: /note="Description of Artificial Sequence: Synthetic oligonucleotide"
ucauaagcaaaguugacgguagc

SEQ ID NO: 1417 - RNA, 23 nt, Artificial Sequence
  source: /note="Description of Artificial Sequence: Synthetic oligonucleotide"
uucauaagcaaaguugacgguag

SEQ ID NO: 1418 - RNA, 23 nt, Artificial Sequence
  source: /note="Description of Artificial Sequence: Synthetic oligonucleotide"
ugucauaagcaaaguugacggua

SEQ ID NO: 1419 - RNA, 23 nt, Artificial Sequence
  source: /note="Description of Artificial Sequence: Synthetic oligonucleotide"
uauaccugugccugugucauaag

SEQ ID NO: 1420 - RNA, 23 nt, Artificial Sequence
  source: /note="Description of Artificial Sequence: Synthetic oligonucleotide"
uuugaaugggauggucagggucu

SEQ ID NO: 1421 - RNA, 23 nt, Artificial Sequence
  source: /note="Description of Artificial Sequence: Synthetic oligonucleotide"
uagcgguucuugaaugggauggu

SEQ ID NO: 1422 - RNA, 23 nt, Artificial Sequence
  source: /note="Description of Artificial Sequence: Synthetic oligonucleotide"
ucuugaaugggauggucaggguc

SEQ ID NO: 1423 - RNA, 23 nt, Artificial Sequence
  source: /note="Description of Artificial Sequence: Synthetic oligonucleotide"
ucgguucuugaaugggaugguca

SEQ ID NO: 1424 - RNA, 23 nt, Artificial Sequence
  source: /note="Description of Artificial Sequence: Synthetic oligonucleotide"
ugcgguucuugaaugggaugguc

SEQ ID NO: 1425 - RNA, 23 nt, Artificial Sequence
  source: /note="Description of Artificial Sequence: Synthetic oligonucleotide"
ucaaucaugcugcuguacuuaua

SEQ ID NO: 1426 - RNA, 23 nt, Artificial Sequence
  source: /note="Description of Artificial Sequence: Synthetic oligonucleotide"
uucaaucaugcugcuguacuuau

SEQ ID NO: 1427 - RNA, 23 nt, Artificial Sequence
  source: /note="Description of Artificial Sequence: Synthetic oligonucleotide"
uagucaaucaugcugcuguacuu

SEQ ID NO: 1428 - RNA, 23 nt, Artificial Sequence
  source: /note="Description of Artificial Sequence: Synthetic oligonucleotide"
ucaaguugucccaggcaaagagc

SEQ ID NO: 1429 - RNA, 23 nt, Artificial Sequence
  source: /note="Description of Artificial Sequence: Synthetic oligonucleotide"
ucauaagugaccauguucaaguu

SEQ ID NO: 1430 - RNA, 23 nt, Artificial Sequence
  source: /note="Description of Artificial Sequence: Synthetic oligonucleotide"
uucauaagugaccauguucaagu

SEQ ID NO: 1431 - RNA, 23 nt, Artificial Sequence
  source: /note="Description of Artificial Sequence: Synthetic oligonucleotide"
ugucauaagugaccauguucaag

SEQ ID NO: 1432 - RNA, 23 nt, Artificial Sequence
  source: /note="Description of Artificial Sequence: Synthetic oligonucleotide"
ucacaucuuggagagcuugaugu

SEQ ID NO: 1433 - RNA, 23 nt, Artificial Sequence
  source: /note="Description of Artificial Sequence: Synthetic oligonucleotide"
uucacaucuuggagagcuugaug

SEQ ID NO: 1434 - RNA, 23 nt, Artificial Sequence
  source: /note="Description of Artificial Sequence: Synthetic oligonucleotide"
ucucagacuacaauuccugaaua

SEQ ID NO: 1435 - RNA, 23 nt, Artificial Sequence
  source: /note="Description of Artificial Sequence: Synthetic oligonucleotide"
uauaaaugcugacagaagauaaa

SEQ ID NO: 1436 - RNA, 23 nt, Artificial Sequence
  source: /note="Description of Artificial Sequence: Synthetic oligonucleotide"
ucauaaaugcugacagaagauaa

SEQ ID NO: 1437 - RNA, 23 nt, Artificial Sequence
  source: /note="Description of Artificial Sequence: Synthetic oligonucleotide"
uccauaaaugcugacagaagaua

SEQ ID NO: 1438 - RNA, 23 nt, Artificial Sequence
  source: /note="Description of Artificial Sequence: Synthetic oligonucleotide"
ucccauaaaugcugacagaagau

SEQ ID NO: 1439 - RNA, 23 nt, Artificial Sequence
  source: /note="Description of Artificial Sequence: Synthetic oligonucleotide"
uaucccauaaaugcugacagaag

SEQ ID NO: 1440 - RNA, 23 nt, Artificial Sequence
  source: /note="Description of Artificial Sequence: Synthetic oligonucleotide"
ucaucccauaaaugcugacagaa

SEQ ID NO: 1441 - RNA, 23 nt, Artificial Sequence
  source: /note="Description of Artificial Sequence: Synthetic oligonucleotide"
ucauuaaacaucccauaaaugcu

SEQ ID NO: 1442 - RNA, 23 nt, Artificial Sequence
  source: /note="Description of Artificial Sequence: Synthetic oligonucleotide"
uucauuaaacaucccauaaaugc

SEQ ID NO: 1443 - RNA, 23 nt, Artificial Sequence
  source: /note="Description of Artificial Sequence: Synthetic oligonucleotide"
ugucauuaaacaucccauaaaug

SEQ ID NO: 1444 - RNA, 23 nt, Artificial Sequence
  source: /note="Description of Artificial Sequence: Synthetic oligonucleotide"
ugaacuaugucauuaaacauccc

SEQ ID NO: 1445 - RNA, 23 nt, Artificial Sequence
  source: /note="Description of Artificial Sequence: Synthetic oligonucleotide"
uagaaaacuugaacuaugucauu

SEQ ID NO: 1446 - RNA, 23 nt, Artificial Sequence
  source: /note="Description of Artificial Sequence: Synthetic oligonucleotide"
uaagaaaacuugaacuaugucau

SEQ ID NO: 1447 - RNA, 23 nt, Artificial Sequence
  source: /note="Description of Artificial Sequence: Synthetic oligonucleotide"
ucaagaaaacuugaacuauguca

SEQ ID NO: 1448 - RNA, 23 nt, Artificial Sequence
  source: /note="Description of Artificial Sequence: Synthetic oligonucleotide"
uagcaaugguuuucaggaagaaa

SEQ ID NO: 1449 - RNA, 23 nt, Artificial Sequence
  source: /note="Description of Artificial Sequence: Synthetic oligonucleotide"
uacaagaaaacuugaacuauguc

SEQ ID NO: 1450 - RNA, 23 nt, Artificial Sequence
  source: /note="Description of Artificial Sequence: Synthetic oligonucleotide"
ucacaagaaaacuugaacuaugu

SEQ ID NO: 1451 - RNA, 23 nt, Artificial Sequence
  source: /note="Description of Artificial Sequence: Synthetic oligonucleotide"
uucacaagaaaacuugaacuaug

SEQ ID NO: 1452 - RNA, 23 nt, Artificial Sequence
  source: /note="Description of Artificial Sequence: Synthetic oligonucleotide"
uaucacaagaaaacuugaacuau

SEQ ID NO: 1453 - RNA, 23 nt, Artificial Sequence
  source: /note="Description of Artificial Sequence: Synthetic oligonucleotide"
ucaaaucacaagaaaacuugaac

SEQ ID NO: 1454 - RNA, 23 nt, Artificial Sequence
  source: /note="Description of Artificial Sequence: Synthetic oligonucleotide"
uaugcaagagcaaugguuuucag

SEQ ID NO: 1455 - RNA, 23 nt, Artificial Sequence
  source: /note="Description of Artificial Sequence: Synthetic oligonucleotide"
ucaugcaagagcaaugguuuuca

SEQ ID NO: 1456 - RNA, 23 nt, Artificial Sequence
  source: /note="Description of Artificial Sequence: Synthetic oligonucleotide"
uauguaacaugcaagagcaaugg

SEQ ID NO: 1457 - RNA, 23 nt, Artificial Sequence
  source: /note="Description of Artificial Sequence: Synthetic oligonucleotide"
ucauguaacaugcaagagcaaug

SEQ ID NO: 1458 - RNA, 23 nt, Artificial Sequence
  source: /note="Description of Artificial Sequence: Synthetic oligonucleotide"
uguaaccauguaacaugcaagag

SEQ ID NO: 1459 - RNA, 23 nt, Artificial Sequence
  source: /note="Description of Artificial Sequence: Synthetic oligonucleotide"
uaaccauguaacaugcaagagca

SEQ ID NO: 1460 - RNA, 23 nt, Artificial Sequence
  source: /note="Description of Artificial Sequence: Synthetic oligonucleotide"
uuaaccauguaacaugcaagagc

SEQ ID NO: 1461 - RNA, 23 nt, Artificial Sequence
  source: /note="Description of Artificial Sequence: Synthetic oligonucleotide"
uccuuuagaaguuaugcuuuuua

SEQ ID NO: 1462 - RNA, 23 nt, Artificial Sequence
  source: /note="Description of Artificial Sequence: Synthetic oligonucleotide"
uuccuuuagaaguuaugcuuuuu

SEQ ID NO: 1463 - RNA, 23 nt, Artificial Sequence
  source: /note="Description of Artificial Sequence: Synthetic oligonucleotide"
ugcuauucugcuuccuuuagaag

SEQ ID NO: 1464 - RNA, 23 nt, Artificial Sequence
  source: /note="Description of Artificial Sequence: Synthetic oligonucleotide"
uagcuauucugcuuccuuuagaa

SEQ ID NO: 1465 - RNA, 23 nt, Artificial Sequence
  source: /note="Description of Artificial Sequence: Synthetic oligonucleotide"
uguaguaaaugcaucuuacuuau

SEQ ID NO: 1466 - RNA, 23 nt, Artificial Sequence
  source: /note="Description of Artificial Sequence: Synthetic oligonucleotide"
uccaacuguauucuaucugaagc

SEQ ID NO: 1467 - RNA, 23 nt, Artificial Sequence
  source: /note="Description of Artificial Sequence: Synthetic oligonucleotide"
ucugaagcauuagaagccaacug

SEQ ID NO: 1468 - RNA, 23 nt, Artificial Sequence
  source: /note="Description of Artificial Sequence: Synthetic oligonucleotide"
uauucuaucugaagcauuagaag

SEQ ID NO: 1469 - RNA, 23 nt, Artificial Sequence
  source: /note="Description of Artificial Sequence: Synthetic oligonucleotide"
ucuguauucuaucugaagcauua

SEQ ID NO: 1470 - RNA, 23 nt, Artificial Sequence
  source: /note="Description of Artificial Sequence: Synthetic oligonucleotide"
ucaacuguauucuaucugaagca

SEQ ID NO: 1471 - RNA, 21 nt, Artificial Sequence
  source: /note="Description of Artificial Sequence: Synthetic oligonucleotide"
cagcacagcagagcuuuccaa

SEQ ID NO: 1472 - RNA, 21 nt, Artificial Sequence
  source: /note="Description of Artificial Sequence: Synthetic oligonucleotide"
agcacagcagagcuuuccaga

SEQ ID NO: 1473 - RNA, 21 nt, Artificial Sequence
  source: /note="Description of Artificial Sequence: Synthetic oligonucleotide"
agguucuucugugcacguuga

SEQ ID NO: 1474 - RNA, 21 nt, Artificial Sequence
  source: /note="Description of Artificial Sequence: Synthetic oligonucleotide"
gguucuucugugcacguugca

SEQ ID NO: 1475 - RNA, 21 nt, Artificial Sequence
  source: /note="Description of Artificial Sequence: Synthetic oligonucleotide"
gccagucccaaugaauccaga

SEQ ID NO: 1476 - RNA, 21 nt, Artificial Sequence
  source: /note="Description of Artificial Sequence: Synthetic oligonucleotide"
cagcuggaaacccaaaccaga

SEQ ID NO: 1477 - RNA, 21 nt, Artificial Sequence
  source: /note="Description of Artificial Sequence: Synthetic oligonucleotide"
uccgagacaagucaguucuga

SEQ ID NO: 1478 - RNA, 21 nt, Artificial Sequence
  source: /note="Description of Artificial Sequence: Synthetic oligonucleotide"
ccgagacaagucaguucugga

SEQ ID NO: 1479 - RNA, 21 nt, Artificial Sequence
  source: /note="Description of Artificial Sequence: Synthetic oligonucleotide"
aggcuccagagaaguuucuaa

SEQ ID NO: 1480 - RNA, 21 nt, Artificial Sequence
  source: /note="Description of Artificial Sequence: Synthetic oligonucleotide"
ggcuccagagaaguuucuaca

SEQ ID NO: 1481 - RNA, 21 nt, Artificial Sequence
  source: /note="Description of Artificial Sequence: Synthetic oligonucleotide"
guggaauuuggacacuuugga

SEQ ID NO: 1482 - RNA, 21 nt, Artificial Sequence
  source: /note="Description of Artificial Sequence: Synthetic oligonucleotide"
uggaauuuggacacuuuggca

SEQ ID NO: 1483 - RNA, 21 nt, Artificial Sequence
  source: /note="Description of Artificial Sequence: Synthetic oligonucleotide"
ggaauuuggacacuuuggcca

SEQ ID NO: 1484 - RNA, 21 nt, Artificial Sequence
  source: /note="Description of Artificial Sequence: Synthetic oligonucleotide"
gaauuuggacacuuuggccua

SEQ ID NO: 1485 - RNA, 21 nt, Artificial Sequence
  source: /note="Description of Artificial Sequence: Synthetic oligonucleotide"
ggacacuuuggccuuccagga

SEQ ID NO: 1486 - RNA, 21 nt, Artificial Sequence
  source: /note="Description of Artificial Sequence: Synthetic oligonucleotide"
uccaggaacugaaguccgaga

SEQ ID NO: 1487 - RNA, 21 nt, Artificial Sequence
  source: /note="Description of Artificial Sequence: Synthetic oligonucleotide"
guccgagcuaacugaaguuca

SEQ ID NO: 1488 - RNA, 21 nt, Artificial Sequence
  source: /note="Description of Artificial Sequence: Synthetic oligonucleotide"
uuccugcuucccgaauuuuga

SEQ ID NO: 1489 - RNA, 21 nt, Artificial Sequence
  source: /note="Description of Artificial Sequence: Synthetic oligonucleotide"
acugaaguccgagcuaacuga

SEQ ID NO: 1490 - RNA, 21 nt, Artificial Sequence
  source: /note="Description of Artificial Sequence: Synthetic oligonucleotide"
cgagcuaacugaaguuccuga

SEQ ID NO: 1491 - RNA, 21 nt, Artificial Sequence
  source: /note="Description of Artificial Sequence: Synthetic oligonucleotide"
acugaaguuccugcuucccga

SEQ ID NO: 1492 - RNA, 21 nt, Artificial Sequence
  source: /note="Description of Artificial Sequence: Synthetic oligonucleotide"
guuccugcuucccgaauuuua

SEQ ID NO: 1493 - RNA, 21 nt, Artificial Sequence
  source: /note="Description of Artificial Sequence: Synthetic oligonucleotide"
uccugcuucccgaauuuugaa

SEQ ID NO: 1494 - RNA, 21 nt, Artificial Sequence
  source: /note="Description of Artificial Sequence: Synthetic oligonucleotide"
ccugcuucccgaauuuugaaa

SEQ ID NO: 1495 - RNA, 21 nt, Artificial Sequence
  source: /note="Description of Artificial Sequence: Synthetic oligonucleotide"
cugcuucccgaauuuugaaga

SEQ ID NO: 1496 - RNA, 21 nt, Artificial Sequence
  source: /note="Description of Artificial Sequence: Synthetic oligonucleotide"
ugcuucccgaauuuugaagga

SEQ ID NO: 1497 - RNA, 21 nt, Artificial Sequence
  source: /note="Description of Artificial Sequence: Synthetic oligonucleotide"
cuucccgaauuuugaaggaga

SEQ ID NO: 1498 - RNA, 21 nt, Artificial Sequence
  source: /note="Description of Artificial Sequence: Synthetic oligonucleotide"
cggauguggagaacuaguuua

SEQ ID NO: 1499 - RNA, 21 nt, Artificial Sequence
  source: /note="Description of Artificial Sequence: Synthetic oligonucleotide"
ggauguggagaacuaguuuga

SEQ ID NO: 1500 - RNA, 21 nt, Artificial Sequence
  source: /note="Description of Artificial Sequence: Synthetic oligonucleotide"
gauguggagaacuaguuugga

SEQ ID NO: 1501 - RNA, 21 nt, Artificial Sequence
  source: /note="Description of Artificial Sequence: Synthetic oligonucleotide"
auguggagaacuaguuuggga

SEQ ID NO: 1502 - RNA, 21 nt, Artificial Sequence
  source: /note="Description of Artificial Sequence: Synthetic oligonucleotide"
uguggagaacuaguuugggua

SEQ ID NO: 1503 - RNA, 21 nt, Artificial Sequence
  source: /note="Description of Artificial Sequence: Synthetic oligonucleotide"
uggagaacuaguuuggguaga

SEQ ID NO: 1504 - RNA, 21 nt, Artificial Sequence
  source: /note="Description of Artificial Sequence: Synthetic oligonucleotide"
ggagaacuaguuuggguagga

SEQ ID NO: 1505 - RNA, 21 nt, Artificial Sequence
  source: /note="Description of Artificial Sequence: Synthetic oligonucleotide"
agaacuaguuuggguaggaga

SEQ ID NO: 1506 - RNA, 21 nt, Artificial Sequence
  source: /note="Description of Artificial Sequence: Synthetic oligonucleotide"
aacagcagaaacaauuacuga

SEQ ID NO: 1507 - RNA, 21 nt, Artificial Sequence
  source: /note="Description of Artificial Sequence: Synthetic oligonucleotide"
acagcagaaacaauuacugga

SEQ ID NO: 1508 - RNA, 21 nt, Artificial Sequence
  source: /note="Description of Artificial Sequence: Synthetic oligonucleotide"
aacaauuacuggcaaguauga

SEQ ID NO: 1509 - RNA, 21 nt, Artificial Sequence
  source: /note="Description of Artificial Sequence: Synthetic oligonucleotide"
acaauuacuggcaaguaugga

SEQ ID NO: 1510 - RNA, 21 nt, Artificial Sequence
  source: /note="Description of Artificial Sequence: Synthetic oligonucleotide"
caauuacuggcaaguauggua

SEQ ID NO: 1511 - RNA, 21 nt, Artificial Sequence
  source: /note="Description of Artificial Sequence: Synthetic oligonucleotide"
aauuacuggcaaguaugguga

SEQ ID NO: 1512 - RNA, 21 nt, Artificial Sequence
  source: /note="Description of Artificial Sequence: Synthetic oligonucleotide"
auuacuggcaaguauggugua

SEQ ID NO: 1513 - RNA, 21 nt, Artificial Sequence
  source: /note="Description of Artificial Sequence: Synthetic oligonucleotide"
uuacuggcaaguaugguguga

SEQ ID NO: 1514 - RNA, 21 nt, Artificial Sequence
  source: /note="Description of Artificial Sequence: Synthetic oligonucleotide"
guaugguguguggaugcgaga

SEQ ID NO: 1515 - RNA, 21 nt, Artificial Sequence
  source: /note="Description of Artificial Sequence: Synthetic oligonucleotide"
gauguccgccagguuuuugaa

SEQ ID NO: 1516 - RNA, 21 nt, Artificial Sequence
  source: /note="Description of Artificial Sequence: Synthetic oligonucleotide"
ccgccagguuuuugaguauga

SEQ ID NO: 1517 - RNA, 21 nt, Artificial Sequence
  source: /note="Description of Artificial Sequence: Synthetic oligonucleotide"
gaccucaucagccaguuuaua

SEQ ID NO: 1518 - RNA, 21 nt, Artificial Sequence
  source: /note="Description of Artificial Sequence: Synthetic oligonucleotide"
uuugaguaugaccucaucaga

SEQ ID NO: 1519 - RNA, 21 nt, Artificial Sequence
  source: /note="Description of Artificial Sequence: Synthetic oligonucleotide"
accucaucagccaguuuauga

SEQ ID NO: 1520 - RNA, 21 nt, Artificial Sequence
  source: /note="Description of Artificial Sequence: Synthetic oligonucleotide"
ccucaucagccaguuuaugca

SEQ ID NO: 1521 - RNA, 21 nt, Artificial Sequence
  source: /note="Description of Artificial Sequence: Synthetic oligonucleotide"
ucaucagccaguuuaugcaga

SEQ ID NO: 1522 - RNA, 21 nt, Artificial Sequence
  source: /note="Description of Artificial Sequence: Synthetic oligonucleotide"
gcagggcuacccuucuaagga

SEQ ID NO: 1523 - RNA, 21 nt, Artificial Sequence
  source: /note="Description of Artificial Sequence: Synthetic oligonucleotide"
cagggcuacccuucuaaggua

SEQ ID NO: 1524 - RNA, 21 nt, Artificial Sequence
  source: /note="Description of Artificial Sequence: Synthetic oligonucleotide"
gggcuacccuucuaagguuca

SEQ ID NO: 1525 - RNA, 21 nt, Artificial Sequence
  source: /note="Description of Artificial Sequence: Synthetic oligonucleotide"
cuucuaagguucacauacuga

SEQ ID NO: 1526 - RNA, 21 nt, Artificial Sequence
  source: /note="Description of Artificial Sequence: Synthetic oligonucleotide"
uucuaagguucacauacugca

SEQ ID NO: 1527 - RNA, 21 nt, Artificial Sequence
  source: /note="Description of Artificial Sequence: Synthetic oligonucleotide"
gaguccagaacugucauaaga

SEQ ID NO: 1528 - RNA, 21 nt, Artificial Sequence
  source: /note="Description of Artificial Sequence: Synthetic oligonucleotide"
guccagaacugucauaagaua

SEQ ID NO: 1529 - RNA, 21 nt, Artificial Sequence
  source: /note="Description of Artificial Sequence: Synthetic oligonucleotide"
cagaacugucauaagauauga

SEQ ID NO: 1530 - RNA, 21 nt, Artificial Sequence
  source: /note="Description of Artificial Sequence: Synthetic oligonucleotide"
agaacugucauaagauaugaa

SEQ ID NO: 1531 - RNA, 21 nt, Artificial Sequence
  source: /note="Description of Artificial Sequence: Synthetic oligonucleotide"
gaacugucauaagauaugaga

SEQ ID NO: 1532 - RNA, 21 nt, Artificial Sequence
  source: /note="Description of Artificial Sequence: Synthetic oligonucleotide"
aacugucauaagauaugagca

SEQ ID NO: 1533 - RNA, 21 nt, Artificial Sequence
  source: /note="Description of Artificial Sequence: Synthetic oligonucleotide"
aagauaugagcugaauaccga

SEQ ID NO: 1534 - RNA, 21 nt, Artificial Sequence
  source: /note="Description of Artificial Sequence: Synthetic oligonucleotide"
agauaugagcugaauaccgaa

SEQ ID NO: 1535 - RNA, 21 nt, Artificial Sequence
  source: /note="Description of Artificial Sequence: Synthetic oligonucleotide"
gauaugagcugaauaccgaga

SEQ ID NO: 1536 - RNA, 21 nt, Artificial Sequence
  source: /note="Description of Artificial Sequence: Synthetic oligonucleotide"
ugaauaccgagacagugaaga

SEQ ID NO: 1537 - RNA, 21 nt, Artificial Sequence
  source: /note="Description of Artificial Sequence: Synthetic oligonucleotide"
gaauaccgagacagugaagga

SEQ ID NO: 1538 - RNA, 21 nt, Artificial Sequence
  source: /note="Description of Artificial Sequence: Synthetic oligonucleotide"
ccacggacaguucccguauua

SEQ ID NO: 1539 - RNA, 21 nt, Artificial Sequence
  source: /note="Description of Artificial Sequence: Synthetic oligonucleotide"
cacggacaguucccguauuca

SEQ ID NO: 1540 - RNA, 21 nt, Artificial Sequence
  source: /note="Description of Artificial Sequence: Synthetic oligonucleotide"
acggacaguucccguauucua

SEQ ID NO: 1541 - RNA, 21 nt, Artificial Sequence
  source: /note="Description of Artificial Sequence: Synthetic oligonucleotide"
accacggacaguucccguaua

SEQ ID NO: 1542 - RNA, 21 nt, Artificial Sequence
  source: /note="Description of Artificial Sequence: Synthetic oligonucleotide"
cggacaguucccguauucuua

SEQ ID NO: 1543 - RNA, 21 nt, Artificial Sequence
  source: /note="Description of Artificial Sequence: Synthetic oligonucleotide"
ggacaguucccguauucuuga

SEQ ID NO: 1544 - RNA, 21 nt, Artificial Sequence
  source: /note="Description of Artificial Sequence: Synthetic oligonucleotide"
gacaguucccguauucuugga

SEQ ID NO: 1545 - RNA, 21 nt, Artificial Sequence
  source: /note="Description of Artificial Sequence: Synthetic oligonucleotide"
caggccucugggucauuuaca

SEQ ID NO: 1546 - RNA, 21 nt, Artificial Sequence
  source: /note="Description of Artificial Sequence: Synthetic oligonucleotide"
aggccucugggucauuuacaa

SEQ ID NO: 1547 - RNA, 21 nt, Artificial Sequence
  source: /note="Description of Artificial Sequence: Synthetic oligonucleotide"
ggccucugggucauuuacaga

SEQ ID NO: 1548 - RNA, 21 nt, Artificial Sequence
  source: /note="Description of Artificial Sequence: Synthetic oligonucleotide"
aggccaaaggugccauuguca

SEQ ID NO: 1549 - RNA, 21 nt, Artificial Sequence
  source: /note="Description of Artificial Sequence: Synthetic oligonucleotide"
ccauuguccucuccaaacuga

SEQ ID NO: 1550 - RNA, 21 nt, Artificial Sequence
  source: /note="Description of Artificial Sequence: Synthetic oligonucleotide"
gucgccaaugccuucaucaua

SEQ ID NO: 1551 - RNA, 21 nt, Artificial Sequence
  source: /note="Description of Artificial Sequence: Synthetic oligonucleotide"
uaccgucaacuuugcuuauga

SEQ ID NO: 1552 - RNA, 21 nt, Artificial Sequence
  source: /note="Description of Artificial Sequence: Synthetic oligonucleotide"
accgucaacuuugcuuaugaa

SEQ ID NO: 1553 - RNA, 21 nt, Artificial Sequence
  source: /note="Description of Artificial Sequence: Synthetic oligonucleotide"
ccgucaacuuugcuuaugaca

SEQ ID NO: 1554 - RNA, 21 nt, Artificial Sequence
  source: /note="Description of Artificial Sequence: Synthetic oligonucleotide"
uaugacacaggcacagguaua

SEQ ID NO: 1555 - RNA, 21 nt, Artificial Sequence
  source: /note="Description of Artificial Sequence: Synthetic oligonucleotide"
acccugaccaucccauucaaa

SEQ ID NO: 1556 - RNA, 21 nt, Artificial Sequence
  source: /note="Description of Artificial Sequence: Synthetic oligonucleotide"
caucccauucaagaaccgcua

SEQ ID NO: 1557 - RNA, 21 nt, Artificial Sequence
  source: /note="Description of Artificial Sequence: Synthetic oligonucleotide"
cccugaccaucccauucaaga

SEQ ID NO: 1558 - RNA, 21 nt, Artificial Sequence
  source: /note="Description of Artificial Sequence: Synthetic oligonucleotide"
accaucccauucaagaaccga

SEQ ID NO: 1559 - RNA, 21 nt, Artificial Sequence
  source: /note="Description of Artificial Sequence: Synthetic oligonucleotide"
ccaucccauucaagaaccgca

SEQ ID NO: 1560 - RNA, 21 nt, Artificial Sequence
  source: /note="Description of Artificial Sequence: Synthetic oligonucleotide"
uaaguacagcagcaugauuga

SEQ ID NO: 1561 - RNA, 21 nt, Artificial Sequence
  source: /note="Description of Artificial Sequence: Synthetic oligonucleotide"
aaguacagcagcaugauugaa

SEQ ID NO: 1562 - RNA, 21 nt, Artificial Sequence
  source: /note="Description of Artificial Sequence: Synthetic oligonucleotide"
guacagcagcaugauugacua

SEQ ID NO: 1563 - RNA, 21 nt, Artificial Sequence
  source: /note="Description of Artificial Sequence: Synthetic oligonucleotide"
ucuuugccugggacaacuuga

SEQ ID NO: 1564 - RNA, 21 nt, Artificial Sequence
  source: /note="Description of Artificial Sequence: Synthetic oligonucleotide"
cuugaacauggucacuuauga

SEQ ID NO: 1565 - RNA, 21 nt, Artificial Sequence
  source: /note="Description of Artificial Sequence: Synthetic oligonucleotide"
uugaacauggucacuuaugaa

SEQ ID NO: 1566 - RNA, 21 nt, Artificial Sequence
  source: /note="Description of Artificial Sequence: Synthetic oligonucleotide"
ugaacauggucacuuaugaca

SEQ ID NO: 1567 - RNA, 21 nt, Artificial Sequence
  source: /note="Description of Artificial Sequence: Synthetic oligonucleotide"
aucaagcucuccaagauguga

SEQ ID NO: 1568 - RNA, 21 nt, Artificial Sequence
  source: /note="Description of Artificial Sequence: Synthetic oligonucleotide"
ucaagcucuccaagaugugaa

SEQ ID NO: 1569 - RNA, 21 nt, Artificial Sequence
  source: /note="Description of Artificial Sequence: Synthetic oligonucleotide"
uucaggaauuguagucugaga

SEQ ID NO: 1570 - RNA, 21 nt, Artificial Sequence
  source: /note="Description of Artificial Sequence: Synthetic oligonucleotide"
uaucuucugucagcauuuaua

SEQ ID NO: 1571 - RNA, 21 nt, Artificial Sequence
  source: /note="Description of Artificial Sequence: Synthetic oligonucleotide"
aucuucugucagcauuuauga

SEQ ID NO: 1572 - RNA, 21 nt, Artificial Sequence
  source: /note="Description of Artificial Sequence: Synthetic oligonucleotide"
ucuucugucagcauuuaugga

SEQ ID NO: 1573 - RNA, 21 nt, Artificial Sequence
  source: /note="Description of Artificial Sequence: Synthetic oligonucleotide"
cuucugucagcauuuauggga

SEQ ID NO: 1574 - RNA, 21 nt, Artificial Sequence
  source: /note="Description of Artificial Sequence: Synthetic oligonucleotide"
ucugucagcauuuaugggaua

SEQ ID NO: 1575 - RNA, 21 nt, Artificial Sequence
  source: /note="Description of Artificial Sequence: Synthetic oligonucleotide"
cugucagcauuuaugggauga

SEQ ID NO: 1576 - RNA, 21 nt, Artificial Sequence
  source: /note="Description of Artificial Sequence: Synthetic oligonucleotide"
cauuuaugggauguuuaauga

SEQ ID NO: 1577 - RNA, 21 nt, Artificial Sequence
  source: /note="Description of Artificial Sequence: Synthetic oligonucleotide"
auuuaugggauguuuaaugaa

SEQ ID NO: 1578 - RNA, 21 nt, Artificial Sequence
  source: /note="Description of Artificial Sequence: Synthetic oligonucleotide"
uuuaugggauguuuaaugaca

SEQ ID NO: 1579 - RNA, 21 nt, Artificial Sequence
  source: /note="Description of Artificial Sequence: Synthetic oligonucleotide"
gauguuuaaugacauaguuca

SEQ ID NO: 1580 - RNA, 21 nt, Artificial Sequence
  source: /note="Description of Artificial Sequence: Synthetic oligonucleotide"
ugacauaguucaaguuuucua

SEQ ID NO: 1581 - RNA, 21 nt, Artificial Sequence
  source: /note="Description of Artificial Sequence: Synthetic oligonucleotide"
gacauaguucaaguuuucuua

SEQ ID NO: 1582 - RNA, 21 nt, Artificial Sequence
  source: /note="Description of Artificial Sequence: Synthetic oligonucleotide"
acauaguucaaguuuucuuga

SEQ ID NO: 1583 - RNA, 21 nt, Artificial Sequence
  source: /note="Description of Artificial Sequence: Synthetic oligonucleotide"
ucuuccugaaaaccauugcua

SEQ ID NO: 1584 - RNA, 21 nt, Artificial Sequence
  source: /note="Description of Artificial Sequence: Synthetic oligonucleotide"
cauaguucaaguuuucuugua

SEQ ID NO: 1585 - RNA, 21 nt, Artificial Sequence
  source: /note="Description of Artificial Sequence: Synthetic oligonucleotide"
auaguucaaguuuucuuguga

SEQ ID NO: 1586 - RNA, 21 nt, Artificial Sequence
  source: /note="Description of Artificial Sequence: Synthetic oligonucleotide"
uaguucaaguuuucuugugaa

SEQ ID NO: 1587 - RNA, 21 nt, Artificial Sequence
  source: /note="Description of Artificial Sequence: Synthetic oligonucleotide"
aguucaaguuuucuugugaua

SEQ ID NO: 1588 - RNA, 21 nt, Artificial Sequence
  source: /note="Description of Artificial Sequence: Synthetic oligonucleotide"
ucaaguuuucuugugauuuga

SEQ ID NO: 1589 - RNA, 21 nt, Artificial Sequence
  source: /note="Description of Artificial Sequence: Synthetic oligonucleotide"
gaaaaccauugcucuugcaua

SEQ ID NO: 1590 - RNA, 21 nt, Artificial Sequence
  source: /note="Description of Artificial Sequence: Synthetic oligonucleotide"
aaaaccauugcucuugcauga

SEQ ID NO: 1591 - RNA, 21 nt, Artificial Sequence
  source: /note="Description of Artificial Sequence: Synthetic oligonucleotide"
auugcucuugcauguuacaua

SEQ ID NO: 1592 - RNA, 21 nt, Artificial Sequence
  source: /note="Description of Artificial Sequence: Synthetic oligonucleotide"
uugcucuugcauguuacauga

SEQ ID NO: 1593 - RNA, 21 nt, Artificial Sequence
  source: /note="Description of Artificial Sequence: Synthetic oligonucleotide"
cuugcauguuacaugguuaca

SEQ ID NO: 1594 - RNA, 21 nt, Artificial Sequence
  source: /note="Description of Artificial Sequence: Synthetic oligonucleotide"
cucuugcauguuacaugguua

SEQ ID NO: 1595 - RNA, 21 nt, Artificial Sequence
  source: /note="Description of Artificial Sequence: Synthetic oligonucleotide"
ucuugcauguuacaugguuaa

SEQ ID NO: 1596 - RNA, 21 nt, Artificial Sequence
  source: /note="Description of Artificial Sequence: Synthetic oligonucleotide"
aaaagcauaacuucuaaagga

SEQ ID NO: 1597 - RNA, 21 nt, Artificial Sequence
  source: /note="Description of Artificial Sequence: Synthetic oligonucleotide"
aaagcauaacuucuaaaggaa

SEQ ID NO: 1598 - RNA, 21 nt, Artificial Sequence
  source: /note="Description of Artificial Sequence: Synthetic oligonucleotide"
ucuaaaggaagcagaauagca

SEQ ID NO: 1599 - RNA, 21 nt, Artificial Sequence
  source: /note="Description of Artificial Sequence: Synthetic oligonucleotide"
cuaaaggaagcagaauagcua

SEQ ID NO: 1600 - RNA, 21 nt, Artificial Sequence
  source: /note="Description of Artificial Sequence: Synthetic oligonucleotide"
aaguaagaugcauuuacuaca

SEQ ID NO: 1601 - RNA, 21 nt, Artificial Sequence
  source: /note="Description of Artificial Sequence: Synthetic oligonucleotide"
uucagauagaauacaguugga

SEQ ID NO: 1602 - RNA, 21 nt, Artificial Sequence
  source: /note="Description of Artificial Sequence: Synthetic oligonucleotide"
guuggcuucuaaugcuucaga

SEQ ID NO: 1603 - RNA, 21 nt, Artificial Sequence
  source: /note="Description of Artificial Sequence: Synthetic oligonucleotide"
ucuaaugcuucagauagaaua

SEQ ID NO: 1604 - RNA, 21 nt, Artificial Sequence
  source: /note="Description of Artificial Sequence: Synthetic oligonucleotide"
augcuucagauagaauacaga

SEQ ID NO: 1605 - RNA, 21 nt, Artificial Sequence
  source: /note="Description of Artificial Sequence: Synthetic oligonucleotide"
cuucagauagaauacaguuga

SEQ ID NO: 1606 - RNA, 23 nt, Artificial Sequence
  source: /note="Description of Artificial Sequence: Synthetic oligonucleotide"
uuggaaagcucugcugugcugag

SEQ ID NO: 1607 - RNA, 23 nt, Artificial Sequence
  source: /note="Description of Artificial Sequence: Synthetic oligonucleotide"
ucuggaaagcucugcugugcuga

SEQ ID NO: 1608 - RNA, 23 nt, Artificial Sequence
  source: /note="Description of Artificial Sequence: Synthetic oligonucleotide"
ucaacgugcacagaagaaccuca

SEQ ID NO: 1609 - RNA, 23 nt, Artificial Sequence
  source: /note="Description of Artificial Sequence: Synthetic oligonucleotide"
ugcaacgugcacagaagaaccuc

SEQ ID NO: 1610 - RNA, 23 nt, Artificial Sequence
  source: /note="Description of Artificial Sequence: Synthetic oligonucleotide"
ucuggauucauugggacuggcca

SEQ ID NO: 1611 - RNA, 23 nt, Artificial Sequence
  source: /note="Description of Artificial Sequence: Synthetic oligonucleotide"
ucugguuuggguuuccagcuggu

SEQ ID NO: 1612 - RNA, 23 nt, Artificial Sequence
  source: /note="Description of Artificial Sequence: Synthetic oligonucleotide"
ucagaacugacuugucucggagg

SEQ ID NO: 1613 - RNA, 23 nt, Artificial Sequence
  source: /note="Description of Artificial Sequence: Synthetic oligonucleotide"
uccagaacugacuugucucggag

SEQ ID NO: 1614 - RNA, 23 nt, Artificial Sequence
  source: /note="Description of Artificial Sequence: Synthetic oligonucleotide"
uuagaaacuucucuggagccugg

SEQ ID NO: 1615 - RNA, 23 nt, Artificial Sequence
  source: /note="Description of Artificial Sequence: Synthetic oligonucleotide"
uguagaaacuucucuggagccug

SEQ ID NO: 1616 - RNA, 23 nt, Artificial Sequence
  source: /note="Description of Artificial Sequence: Synthetic oligonucleotide"
uccaaaguguccaaauuccacgu

SEQ ID NO: 1617 - RNA, 23 nt, Artificial Sequence
  source: /note="Description of Artificial Sequence: Synthetic oligonucleotide"
ugccaaaguguccaaauuccacg

SEQ ID NO: 1618 - RNA, 23 nt, Artificial Sequence
  source: /note="Description of Artificial Sequence: Synthetic oligonucleotide"
uggccaaaguguccaaauuccac

SEQ ID NO: 1619 - RNA, 23 nt, Artificial Sequence
  source: /note="Description of Artificial Sequence: Synthetic oligonucleotide"
uaggccaaaguguccaaauucca

SEQ ID NO: 1620 - RNA, 23 nt, Artificial Sequence
  source: /note="Description of Artificial Sequence: Synthetic oligonucleotide"
uccuggaaggccaaaguguccaa

SEQ ID NO: 1621 - RNA, 23 nt, Artificial Sequence
  source: /note="Description of Artificial Sequence: Synthetic oligonucleotide"
ucucggacuucaguuccuggaag

SEQ ID NO: 1622 - RNA, 23 nt, Artificial Sequence
  source: /note="Description of Artificial Sequence: Synthetic oligonucleotide"
ugaacuucaguuagcucggacuu

SEQ ID NO: 1623 - RNA, 23 nt, Artificial Sequence
  source: /note="Description of Artificial Sequence: Synthetic oligonucleotide"
ucaaaauucgggaagcaggaacu

SEQ ID NO: 1624 - RNA, 23 nt, Artificial Sequence
  source: /note="Description of Artificial Sequence: Synthetic oligonucleotide"
ucaguuagcucggacuucaguuc

SEQ ID NO: 1625 - RNA, 23 nt, Artificial Sequence
  source: /note="Description of Artificial Sequence: Synthetic oligonucleotide"
ucaggaacuucaguuagcucgga

SEQ ID NO: 1626 - RNA, 23 nt, Artificial Sequence
  source: /note="Description of Artificial Sequence: Synthetic oligonucleotide"
ucgggaagcaggaacuucaguua

SEQ ID NO: 1627 - RNA, 23 nt, Artificial Sequence
  source: /note="Description of Artificial Sequence: Synthetic oligonucleotide"
uaaaauucgggaagcaggaacuu

SEQ ID NO: 1628 - RNA, 23 nt, Artificial Sequence
  source: /note="Description of Artificial Sequence: Synthetic oligonucleotide"
uucaaaauucgggaagcaggaac

SEQ ID NO: 1629 - RNA, 23 nt, Artificial Sequence
  source: /note="Description of Artificial Sequence: Synthetic oligonucleotide"
uuucaaaauucgggaagcaggaa

SEQ ID NO: 1630 - RNA, 23 nt, Artificial Sequence
  source: /note="Description of Artificial Sequence: Synthetic oligonucleotide"
ucuucaaaauucgggaagcagga

SEQ ID NO: 1631 - RNA, 23 nt, Artificial Sequence
  source: /note="Description of Artificial Sequence: Synthetic oligonucleotide"
uccuucaaaauucgggaagcagg

SEQ ID NO: 1632 - RNA, 23 nt, Artificial Sequence
  source: /note="Description of Artificial Sequence: Synthetic oligonucleotide"
ucuccuucaaaauucgggaagca

SEQ ID NO: 1633 - RNA, 23 nt, Artificial Sequence
  source: /note="Description of Artificial Sequence: Synthetic oligonucleotide"
uaaacuaguucuccacauccggu

SEQ ID NO: 1634 - RNA, 23 nt, Artificial Sequence
  source: /note="Description of Artificial Sequence: Synthetic oligonucleotide"
ucaaacuaguucuccacauccgg

SEQ ID NO: 1635 - RNA, 23 nt, Artificial Sequence
  source: /note="Description of Artificial Sequence: Synthetic oligonucleotide"
uccaaacuaguucuccacauccg

SEQ ID NO: 1636 - RNA, 23 nt, Artificial Sequence
  source: /note="Description of Artificial Sequence: Synthetic oligonucleotide"
ucccaaacuaguucuccacaucc

SEQ ID NO: 1637 - RNA, 23 nt, Artificial Sequence
  source: /note="Description of Artificial Sequence: Synthetic oligonucleotide"
uacccaaacuaguucuccacauc

SEQ ID NO: 1638 - RNA, 23 nt, Artificial Sequence
  source: /note="Description of Artificial Sequence: Synthetic oligonucleotide"
ucuacccaaacuaguucuccaca

SEQ ID NO: 1639 - RNA, 23 nt, Artificial Sequence
  source: /note="Description of Artificial Sequence: Synthetic oligonucleotide"
uccuacccaaacuaguucuccac

SEQ ID NO: 1640 - RNA, 23 nt, Artificial Sequence
  source: /note="Description of Artificial Sequence: Synthetic oligonucleotide"
ucuccuacccaaacuaguucucc

SEQ ID NO: 1641 - RNA, 23 nt, Artificial Sequence
  source: /note="Description of Artificial Sequence: Synthetic oligonucleotide"
ucaguaauuguuucugcuguucu

SEQ ID NO: 1642 - RNA, 23 nt, Artificial Sequence
  source: /note="Description of Artificial Sequence: Synthetic oligonucleotide"
uccaguaauuguuucugcuguuc

SEQ ID NO: 1643 - RNA, 23 nt, Artificial Sequence
  source: /note="Description of Artificial Sequence: Synthetic oligonucleotide"
ucauacuugccaguaauuguuuc

SEQ ID NO: 1644 - RNA, 23 nt, Artificial Sequence
  source: /note="Description of Artificial Sequence: Synthetic oligonucleotide"
uccauacuugccaguaauuguuu

SEQ ID NO: 1645 - RNA, 23 nt, Artificial Sequence
  source: /note="Description of Artificial Sequence: Synthetic oligonucleotide"
uaccauacuugccaguaauuguu

SEQ ID NO: 1646 - RNA, 23 nt, Artificial Sequence
  source: /note="Description of Artificial Sequence: Synthetic oligonucleotide"
ucaccauacuugccaguaauugu

SEQ ID NO: 1647 - RNA, 23 nt, Artificial Sequence
  source: /note="Description of Artificial Sequence: Synthetic oligonucleotide"
uacaccauacuugccaguaauug

SEQ ID NO: 1648 - RNA, 23 nt, Artificial Sequence
  source: /note="Description of Artificial Sequence: Synthetic oligonucleotide"
ucacaccauacuugccaguaauu

SEQ ID NO: 1649 - RNA, 23 nt, Artificial Sequence
  source: /note="Description of Artificial Sequence: Synthetic oligonucleotide"
ucucgcauccacacaccauacuu

SEQ ID NO: 1650 - RNA, 23 nt, Artificial Sequence
  source: /note="Description of Artificial Sequence: Synthetic oligonucleotide"
uucaaaaaccuggcggacauccg

SEQ ID NO: 1651 - RNA, 23 nt, Artificial Sequence
  source: /note="Description of Artificial Sequence: Synthetic oligonucleotide"
ucauacucaaaaaccuggcggac

SEQ ID NO: 1652 - RNA, 23 nt, Artificial Sequence
  source: /note="Description of Artificial Sequence: Synthetic oligonucleotide"
uauaaacuggcugaugaggucau

SEQ ID NO: 1653 - RNA, 23 nt, Artificial Sequence
  source: /note="Description of Artificial Sequence: Synthetic oligonucleotide"
ucugaugaggucauacucaaaaa

SEQ ID NO: 1654 - RNA, 23 nt, Artificial Sequence
  source: /note="Description of Artificial Sequence: Synthetic oligonucleotide"
ucauaaacuggcugaugagguca

SEQ ID NO: 1655 - RNA, 23 nt, Artificial Sequence
  source: /note="Description of Artificial Sequence: Synthetic oligonucleotide"
ugcauaaacuggcugaugagguc

SEQ ID NO: 1656 - RNA, 23 nt, Artificial Sequence
  source: /note="Description of Artificial Sequence: Synthetic oligonucleotide"
ucugcauaaacuggcugaugagg

SEQ ID NO: 1657 - RNA, 23 nt, Artificial Sequence
  source: /note="Description of Artificial Sequence: Synthetic oligonucleotide"
uccuuagaaggguagcccugcau

SEQ ID NO: 1658 - RNA, 23 nt, Artificial Sequence
  source: /note="Description of Artificial Sequence: Synthetic oligonucleotide"
uaccuuagaaggguagcccugca

SEQ ID NO: 1659 - RNA, 23 nt, Artificial Sequence
  source: /note="Description of Artificial Sequence: Synthetic oligonucleotide"
ugaaccuuagaaggguagcccug

SEQ ID NO: 1660 - RNA, 23 nt, Artificial Sequence
  source: /note="Description of Artificial Sequence: Synthetic oligonucleotide"
ucaguaugugaaccuuagaaggg

SEQ ID NO: 1661 - RNA, 23 nt, Artificial Sequence
  source: /note="Description of Artificial Sequence: Synthetic oligonucleotide"
ugcaguaugugaaccuuagaagg

SEQ ID NO: 1662 - RNA, 23 nt, Artificial Sequence
  source: /note="Description of Artificial Sequence: Synthetic oligonucleotide"
ucuuaugacaguucuggacucag

SEQ ID NO: 1663 - RNA, 23 nt, Artificial Sequence
  source: /note="Description of Artificial Sequence: Synthetic oligonucleotide"
uaucuuaugacaguucuggacuc

SEQ ID NO: 1664 - RNA, 23 nt, Artificial Sequence
  source: /note="Description of Artificial Sequence: Synthetic oligonucleotide"
ucauaucuuaugacaguucugga

SEQ ID NO: 1665 - RNA, 23 nt, Artificial Sequence
  source: /note="Description of Artificial Sequence: Synthetic oligonucleotide"
uucauaucuuaugacaguucugg

SEQ ID NO: 1666 - RNA, 23 nt, Artificial Sequence
  source: /note="Description of Artificial Sequence: Synthetic oligonucleotide"
ucucauaucuuaugacaguucug

SEQ ID NO: 1667 - RNA, 23 nt, Artificial Sequence
  source: /note="Description of Artificial Sequence: Synthetic oligonucleotide"
ugcucauaucuuaugacaguucu

SEQ ID NO: 1668 - RNA, 23 nt, Artificial Sequence
  source: /note="Description of Artificial Sequence: Synthetic oligonucleotide"
ucgguauucagcucauaucuuau

SEQ ID NO: 1669 - RNA, 23 nt, Artificial Sequence
  source: /note="Description of Artificial Sequence: Synthetic oligonucleotide"
uucgguauucagcucauaucuua

SEQ ID NO: 1670 - RNA, 23 nt, Artificial Sequence
  source: /note="Description of Artificial Sequence: Synthetic oligonucleotide"
ucucgguauucagcucauaucuu

SEQ ID NO: 1671 - RNA, 23 nt, Artificial Sequence
  source: /note="Description of Artificial Sequence: Synthetic oligonucleotide"
ucuucacugucucgguauucagc

SEQ ID NO: 1672 - RNA, 23 nt, Artificial Sequence
  source: /note="Description of Artificial Sequence: Synthetic oligonucleotide"
uccuucacugucucgguauucag

SEQ ID NO: 1673 - RNA, 23 nt, Artificial Sequence
  source: /note="Description of Artificial Sequence: Synthetic oligonucleotide"
uaauacgggaacuguccguggua

SEQ ID NO: 1674 - RNA, 23 nt, Artificial Sequence
  source: /note="Description of Artificial Sequence: Synthetic oligonucleotide"
ugaauacgggaacuguccguggu

SEQ ID NO: 1675 - RNA, 23 nt, Artificial Sequence
  source: /note="Description of Artificial Sequence: Synthetic oligonucleotide"
uagaauacgggaacuguccgugg

SEQ ID NO: 1676 - RNA, 23 nt, Artificial Sequence
  source: /note="Description of Artificial Sequence: Synthetic oligonucleotide"
uauacgggaacuguccgugguag

SEQ ID NO: 1677 - RNA, 23 nt, Artificial Sequence
  source: /note="Description of Artificial Sequence: Synthetic oligonucleotide"
uaagaauacgggaacuguccgug

SEQ ID NO: 1678 - RNA, 23 nt, Artificial Sequence
  source: /note="Description of Artificial Sequence: Synthetic oligonucleotide"
ucaagaauacgggaacuguccgu

SEQ ID NO: 1679 - RNA, 23 nt, Artificial Sequence
  source: /note="Description of Artificial Sequence: Synthetic oligonucleotide"
uccaagaauacgggaacuguccg

SEQ ID NO: 1680 - RNA, 23 nt, Artificial Sequence
  source: /note="Description of Artificial Sequence: Synthetic oligonucleotide"
uguaaaugacccagaggccugcu

SEQ ID NO: 1681 - RNA, 23 nt, Artificial Sequence
  source: /note="Description of Artificial Sequence: Synthetic oligonucleotide"
uuguaaaugacccagaggccugc

SEQ ID NO: 1682 - RNA, 23 nt, Artificial Sequence
  source: /note="Description of Artificial Sequence: Synthetic oligonucleotide"
ucuguaaaugacccagaggccug

SEQ ID NO: 1683 - RNA, 23 nt, Artificial Sequence
  source: /note="Description of Artificial Sequence: Synthetic oligonucleotide"
ugacaauggcaccuuuggccuca

SEQ ID NO: 1684 - RNA, 23 nt, Artificial Sequence
  source: /note="Description of Artificial Sequence: Synthetic oligonucleotide"
ucaguuuggagaggacaauggca

SEQ ID NO: 1685 - RNA, 23 nt, Artificial Sequence
  source: /note="Description of Artificial Sequence: Synthetic oligonucleotide"
uaugaugaaggcauuggcgacug

SEQ ID NO: 1686 - RNA, 23 nt, Artificial Sequence
  source: /note="Description of Artificial Sequence: Synthetic oligonucleotide"
ucauaagcaaaguugacgguagc

SEQ ID NO: 1687 - RNA, 23 nt, Artificial Sequence
  source: /note="Description of Artificial Sequence: Synthetic oligonucleotide"
uucauaagcaaaguugacgguag

SEQ ID NO: 1688 - RNA, 23 nt, Artificial Sequence
  source: /note="Description of Artificial Sequence: Synthetic oligonucleotide"
ugucauaagcaaaguugacggua

SEQ ID NO: 1689 - RNA, 23 nt, Artificial Sequence
  source: /note="Description of Artificial Sequence: Synthetic oligonucleotide"
uauaccugugccugugucauaag

SEQ ID NO: 1690 - RNA, 23 nt, Artificial Sequence
  source: /note="Description of Artificial Sequence: Synthetic oligonucleotide"
uuugaaugggauggucagggucu

SEQ ID NO: 1691 - RNA, 23 nt, Artificial Sequence
  source: /note="Description of Artificial Sequence: Synthetic oligonucleotide"
uagcgguucuugaaugggauggu

SEQ ID NO: 1692 - RNA, 23 nt, Artificial Sequence
  source: /note="Description of Artificial Sequence: Synthetic oligonucleotide"
ucuugaaugggauggucaggguc

SEQ ID NO: 1693 - RNA, 23 nt, Artificial Sequence
  source: /note="Description of Artificial Sequence: Synthetic oligonucleotide"
ucgguucuugaaugggaugguca

SEQ ID NO: 1694 - RNA, 23 nt, Artificial Sequence
  source: /note="Description of Artificial Sequence: Synthetic oligonucleotide"
ugcgguucuugaaugggaugguc

SEQ ID NO: 1695 - RNA, 23 nt, Artificial Sequence
  source: /note="Description of Artificial Sequence: Synthetic oligonucleotide"
ucaaucaugcugcuguacuuaua

SEQ ID NO: 1696 - RNA, 23 nt, Artificial Sequence
  source: /note="Description of Artificial Sequence: Synthetic oligonucleotide"
uucaaucaugcugcuguacuuau

SEQ ID NO: 1697 - RNA, 23 nt, Artificial Sequence
  source: /note="Description of Artificial Sequence: Synthetic oligonucleotide"
uagucaaucaugcugcuguacuu

SEQ ID NO: 1698 - RNA, 23 nt, Artificial Sequence
  source: /note="Description of Artificial Sequence: Synthetic oligonucleotide"
ucaaguugucccaggcaaagagc

SEQ ID NO: 1699 - RNA, 23 nt, Artificial Sequence
  source: /note="Description of Artificial Sequence: Synthetic oligonucleotide"
ucauaagugaccauguucaaguu

SEQ ID NO: 1700 - RNA, 23 nt, Artificial Sequence
  source: /note="Description of Artificial Sequence: Synthetic oligonucleotide"
uucauaagugaccauguucaagu

SEQ ID NO: 1701 - RNA, 23 nt, Artificial Sequence
  source: /note="Description of Artificial Sequence: Synthetic oligonucleotide"
ugucauaagugaccauguucaag

SEQ ID NO: 1702 - RNA, 23 nt, Artificial Sequence
  source: /note="Description of Artificial Sequence: Synthetic oligonucleotide"
ucacaucuuggagagcuugaugu

SEQ ID NO: 1703 - RNA, 23 nt, Artificial Sequence
  source: /note="Description of Artificial Sequence: Synthetic oligonucleotide"
uucacaucuuggagagcuugaug

SEQ ID NO: 1704 - RNA, 23 nt, Artificial Sequence
  source: /note="Description of Artificial Sequence: Synthetic oligonucleotide"
ucucagacuacaauuccugaaua

SEQ ID NO: 1705 - RNA, 23 nt, Artificial Sequence
  source: /note="Description of Artificial Sequence: Synthetic oligonucleotide"
uauaaaugcugacagaagauaaa

SEQ ID NO: 1706 - RNA, 23 nt, Artificial Sequence
  source: /note="Description of Artificial Sequence: Synthetic oligonucleotide"
ucauaaaugcugacagaagauaa

SEQ ID NO: 1707 - RNA, 23 nt, Artificial Sequence
  source: /note="Description of Artificial Sequence: Synthetic oligonucleotide"
uccauaaaugcugacagaagaua

SEQ ID NO: 1708 - RNA, 23 nt, Artificial Sequence
  source: /note="Description of Artificial Sequence: Synthetic oligonucleotide"
ucccauaaaugcugacagaagau

SEQ ID NO: 1709 - RNA, 23 nt, Artificial Sequence
  source: /note="Description of Artificial Sequence: Synthetic oligonucleotide"
uaucccauaaaugcugacagaag

SEQ ID NO: 1710 - RNA, 23 nt, Artificial Sequence
  source: /note="Description of Artificial Sequence: Synthetic oligonucleotide"
ucaucccauaaaugcugacagaa

SEQ ID NO: 1711 - RNA, 23 nt, Artificial Sequence
  source: /note="Description of Artificial Sequence: Synthetic oligonucleotide"
ucauuaaacaucccauaaaugcu

SEQ ID NO: 1712 - RNA, 23 nt, Artificial Sequence
  source: /note="Description of Artificial Sequence: Synthetic oligonucleotide"
uucauuaaacaucccauaaaugc

SEQ ID NO: 1713 - RNA, 23 nt, Artificial Sequence
  source: /note="Description of Artificial Sequence: Synthetic oligonucleotide"
ugucauuaaacaucccauaaaug

SEQ ID NO: 1714 - RNA, 23 nt, Artificial Sequence
  source: /note="Description of Artificial Sequence: Synthetic oligonucleotide"
ugaacuaugucauuaaacauccc

SEQ ID NO: 1715 - RNA, 23 nt, Artificial Sequence
  source: /note="Description of Artificial Sequence: Synthetic oligonucleotide"
uagaaaacuugaacuaugucauu

SEQ ID NO: 1716 - RNA, 23 nt, Artificial Sequence
  source: /note="Description of Artificial Sequence: Synthetic oligonucleotide"
uaagaaaacuugaacuaugucau

SEQ ID NO: 1717 - RNA, 23 nt, Artificial Sequence
  source: /note="Description of Artificial Sequence: Synthetic oligonucleotide"
ucaagaaaacuugaacuauguca

SEQ ID NO: 1718 - RNA, 23 nt, Artificial Sequence
  source: /note="Description of Artificial Sequence: Synthetic oligonucleotide"
uagcaaugguuuucaggaagaaa

SEQ ID NO: 1719 - RNA, 23 nt, Artificial Sequence
  source: /note="Description of Artificial Sequence: Synthetic oligonucleotide"
uacaagaaaacuugaacuauguc

SEQ ID NO: 1720 - RNA, 23 nt, Artificial Sequence
  source: /note="Description of Artificial Sequence: Synthetic oligonucleotide"
ucacaagaaaacuugaacuaugu

SEQ ID NO: 1721 - RNA, 23 nt, Artificial Sequence
  source: /note="Description of Artificial Sequence: Synthetic oligonucleotide"
uucacaagaaaacuugaacuaug

SEQ ID NO: 1722 - RNA, 23 nt, Artificial Sequence
  source: /note="Description of Artificial Sequence: Synthetic oligonucleotide"
uaucacaagaaaacuugaacuau

SEQ ID NO: 1723 - RNA, 23 nt, Artificial Sequence
  source: /note="Description of Artificial Sequence: Synthetic oligonucleotide"
ucaaaucacaagaaaacuugaac

SEQ ID NO: 1724 - RNA, 23 nt, Artificial Sequence
  source: /note="Description of Artificial Sequence: Synthetic oligonucleotide"
uaugcaagagcaaugguuuucag

SEQ ID NO: 1725 - RNA, 23 nt, Artificial Sequence
  source: /note="Description of Artificial Sequence: Synthetic oligonucleotide"
ucaugcaagagcaaugguuuuca

SEQ ID NO: 1726 - RNA, 23 nt, Artificial Sequence
  source: /note="Description of Artificial Sequence: Synthetic oligonucleotide"
uauguaacaugcaagagcaaugg

SEQ ID NO: 1727 - RNA, 23 nt, Artificial Sequence
  source: /note="Description of Artificial Sequence: Synthetic oligonucleotide"
ucauguaacaugcaagagcaaug

SEQ ID NO: 1728 - RNA, 23 nt, Artificial Sequence
  source: /note="Description of Artificial Sequence: Synthetic oligonucleotide"
uguaaccauguaacaugcaagag

SEQ ID NO: 1729 - RNA, 23 nt, Artificial Sequence
  source: /note="Description of Artificial Sequence: Synthetic oligonucleotide"
uaaccauguaacaugcaagagca

SEQ ID NO: 1730 - RNA, 23 nt, Artificial Sequence
  source: /note="Description of Artificial Sequence: Synthetic oligonucleotide"
uuaaccauguaacaugcaagagc

SEQ ID NO: 1731 - RNA, 23 nt, Artificial Sequence
  source: /note="Description of Artificial Sequence: Synthetic oligonucleotide"
uccuuuagaaguuaugcuuuuua

SEQ ID NO: 1732 - RNA, 23 nt, Artificial Sequence
  source: /note="Description of Artificial Sequence: Synthetic oligonucleotide"
uuccuuuagaaguuaugcuuuuu

SEQ ID NO: 1733 - RNA, 23 nt, Artificial Sequence
  source: /note="Description of Artificial Sequence: Synthetic oligonucleotide"
ugcuauucugcuuccuuuagaag

SEQ ID NO: 1734 - RNA, 23 nt, Artificial Sequence
  source: /note="Description of Artificial Sequence: Synthetic oligonucleotide"
uagcuauucugcuuccuuuagaa

SEQ ID NO: 1735 - RNA, 23 nt, Artificial Sequence
  source: /note="Description of Artificial Sequence: Synthetic oligonucleotide"
uguaguaaaugcaucuuacuuau

SEQ ID NO: 1736 - RNA, 23 nt, Artificial Sequence
  source: /note="Description of Artificial Sequence: Synthetic oligonucleotide"
uccaacuguauucuaucugaagc

SEQ ID NO: 1737 - RNA, 23 nt, Artificial Sequence
  source: /note="Description of Artificial Sequence: Synthetic oligonucleotide"
ucugaagcauuagaagccaacug

SEQ ID NO: 1738 - RNA, 23 nt, Artificial Sequence
  source: /note="Description of Artificial Sequence: Synthetic oligonucleotide"
uauucuaucugaagcauuagaag

SEQ ID NO: 1739 - RNA, 23 nt, Artificial Sequence
  source: /note="Description of Artificial Sequence: Synthetic oligonucleotide"
ucuguauucuaucugaagcauua

SEQ ID NO: 1740 - RNA, 23 nt, Artificial Sequence
  source: /note="Description of Artificial Sequence: Synthetic oligonucleotide"
ucaacuguauucuaucugaagca

SEQ ID NO: 1741 - RNA, 21 nt, Artificial Sequence
  source: /note="Description of Artificial Sequence: Synthetic oligonucleotide"
cgagacaagucaguucuggaa

SEQ ID NO: 1742 - RNA, 21 nt, Artificial Sequence
  source: /note="Description of Artificial Sequence: Synthetic oligonucleotide"
ggcuccagagaaguuucuaca

SEQ ID NO: 1743 - RNA, 21 nt, Artificial Sequence
  source: /note="Description of Artificial Sequence: Synthetic oligonucleotide"
cguggaauuuggacacuuuga

SEQ ID NO: 1744 - RNA, 21 nt, Artificial Sequence
  source: /note="Description of Artificial Sequence: Synthetic oligonucleotide"
guggaauuuggacacuuugga

SEQ ID NO: 1745 - RNA, 21 nt, Artificial Sequence
  source: /note="Description of Artificial Sequence: Synthetic oligonucleotide"
uuccaggaacugaaguccgaa

SEQ ID NO: 1746 - RNA, 21 nt, Artificial Sequence
  source: /note="Description of Artificial Sequence: Synthetic oligonucleotide"
cugaaguccgagcuaacugaa

SEQ ID NO: 1747 - RNA, 21 nt, Artificial Sequence
  source: /note="Description of Artificial Sequence: Synthetic oligonucleotide"
aaguccgagcuaacugaagua

SEQ ID NO: 1748 - RNA, 21 nt, Artificial Sequence
  source: /note="Description of Artificial Sequence: Synthetic oligonucleotide"
aguccgagcuaacugaaguua

SEQ ID NO: 1749 - RNA, 21 nt, Artificial Sequence
  source: /note="Description of Artificial Sequence: Synthetic oligonucleotide"
guccgagcuaacugaaguuca

SEQ ID NO: 1750 - RNA, 21 nt, Artificial Sequence
  source: /note="Description of Artificial Sequence: Synthetic oligonucleotide"
uccgagcuaacugaaguucca

SEQ ID NO: 1751 - RNA, 21 nt, Artificial Sequence
  source: /note="Description of Artificial Sequence: Synthetic oligonucleotide"
ccgagcuaacugaaguuccua

SEQ ID NO: 1752 - RNA, 21 nt, Artificial Sequence
  source: /note="Description of Artificial Sequence: Synthetic oligonucleotide"
cgagcuaacugaaguuccuga

SEQ ID NO: 1753 - RNA, 21 nt, Artificial Sequence
  source: /note="Description of Artificial Sequence: Synthetic oligonucleotide"
aaguuccugcuucccgaauua

SEQ ID NO: 1754 - RNA, 21 nt, Artificial Sequence
  source: /note="Description of Artificial Sequence: Synthetic oligonucleotide"
aguuccugcuucccgaauuua

SEQ ID NO: 1755 - RNA, 21 nt, Artificial Sequence
  source: /note="Description of Artificial Sequence: Synthetic oligonucleotide"
guuccugcuucccgaauuuua

SEQ ID NO: 1756 - RNA, 21 nt, Artificial Sequence
  source: /note="Description of Artificial Sequence: Synthetic oligonucleotide"
uuccugcuucccgaauuuuga

SEQ ID NO: 1757 - RNA, 21 nt, Artificial Sequence
  source: /note="Description of Artificial Sequence: Synthetic oligonucleotide"
uccugcuucccgaauuuugaa

SEQ ID NO: 1758 - RNA, 21 nt, Artificial Sequence
  source: /note="Description of Artificial Sequence: Synthetic oligonucleotide"
ccugcuucccgaauuuugaaa

SEQ ID NO: 1759 - RNA, 21 nt, Artificial Sequence
  source: /note="Description of Artificial Sequence: Synthetic oligonucleotide"
cugcuucccgaauuuugaaga

SEQ ID NO: 1760 - RNA, 21 nt, Artificial Sequence
  source: /note="Description of Artificial Sequence: Synthetic oligonucleotide"
cuucccgaauuuugaaggaga

SEQ ID NO: 1761 - RNA, 21 nt, Artificial Sequence
  source: /note="Description of Artificial Sequence: Synthetic oligonucleotide"
cggauguggagaacuaguuua

SEQ ID NO: 1762 - RNA, 21 nt, Artificial Sequence
  source: /note="Description of Artificial Sequence: Synthetic oligonucleotide"
ggauguggagaacuaguuuga

SEQ ID NO: 1763 - RNA, 21 nt, Artificial Sequence
  source: /note="Description of Artificial Sequence: Synthetic oligonucleotide"
uguggagaacuaguuugggua

SEQ ID NO: 1764 - RNA, 21 nt, Artificial Sequence
  source: /note="Description of Artificial Sequence: Synthetic oligonucleotide"
aacagcagaaacaauuacuga

SEQ ID NO: 1765 - RNA, 21 nt, Artificial Sequence
  source: /note="Description of Artificial Sequence: Synthetic oligonucleotide"
acagcagaaacaauuacugga

SEQ ID NO: 1766 - RNA, 21 nt, Artificial Sequence
  source: /note="Description of Artificial Sequence: Synthetic oligonucleotide"
cagcagaaacaauuacuggca

SEQ ID NO: 1767 - RNA, 21 nt, Artificial Sequence
  source: /note="Description of Artificial Sequence: Synthetic oligonucleotide"
cagaaacaauuacuggcaaga

SEQ ID NO: 1768 - RNA, 21 nt, Artificial Sequence
  source: /note="Description of Artificial Sequence: Synthetic oligonucleotide"
aaacaauuacuggcaaguaua

SEQ ID NO: 1769 - RNA, 21 nt, Artificial Sequence
  source: /note="Description of Artificial Sequence: Synthetic oligonucleotide"
aacaauuacuggcaaguauga

SEQ ID NO: 1770 - RNA, 21 nt, Artificial Sequence
  source: /note="Description of Artificial Sequence: Synthetic oligonucleotide"
uacuggcaaguauggugugua

SEQ ID NO: 1771 - RNA, 21 nt, Artificial Sequence
  source: /note="Description of Artificial Sequence: Synthetic oligonucleotide"
uccgccagguuuuugaguaua

SEQ ID NO: 1772 - RNA, 21 nt, Artificial Sequence
  source: /note="Description of Artificial Sequence: Synthetic oligonucleotide"
cgccagguuuuugaguaugaa

SEQ ID NO: 1773 - RNA, 21 nt, Artificial Sequence
  source: /note="Description of Artificial Sequence: Synthetic oligonucleotide"
uuugaguaugaccucaucaga

SEQ ID NO: 1774 - RNA, 21 nt, Artificial Sequence
  source: /note="Description of Artificial Sequence: Synthetic oligonucleotide"
gaccucaucagccaguuuaua

SEQ ID NO: 1775 - RNA, 21 nt, Artificial Sequence
  source: /note="Description of Artificial Sequence: Synthetic oligonucleotide"
accucaucagccaguuuauga

SEQ ID NO: 1776 - RNA, 21 nt, Artificial Sequence
  source: /note="Description of Artificial Sequence: Synthetic oligonucleotide"
gcuacccuucuaagguucaca

SEQ ID NO: 1777 - RNA, 21 nt, Artificial Sequence
  source: /note="Description of Artificial Sequence: Synthetic oligonucleotide"
cuucuaagguucacauacuga

SEQ ID NO: 1778 - RNA, 21 nt, Artificial Sequence
  source: /note="Description of Artificial Sequence: Synthetic oligonucleotide"
uucuaagguucacauacugca

SEQ ID NO: 1779 - RNA, 21 nt, Artificial Sequence
  source: /note="Description of Artificial Sequence: Synthetic oligonucleotide"
ucuaagguucacauacugcca

SEQ ID NO: 1780 - RNA, 21 nt, Artificial Sequence
  source: /note="Description of Artificial Sequence: Synthetic oligonucleotide"
gaguccagaacugucauaaga

SEQ ID NO: 1781 - RNA, 21 nt, Artificial Sequence
  source: /note="Description of Artificial Sequence: Synthetic oligonucleotide"
aguccagaacugucauaagaa

SEQ ID NO: 1782 - RNA, 21 nt, Artificial Sequence
  source: /note="Description of Artificial Sequence: Synthetic oligonucleotide"
guccagaacugucauaagaua

SEQ ID NO: 1783 - RNA, 21 nt, Artificial Sequence
  source: /note="Description of Artificial Sequence: Synthetic oligonucleotide"
cagaacugucauaagauauga

SEQ ID NO: 1784 - RNA, 21 nt, Artificial Sequence
  source: /note="Description of Artificial Sequence: Synthetic oligonucleotide"
agaacugucauaagauaugaa

SEQ ID NO: 1785 - RNA, 21 nt, Artificial Sequence
  source: /note="Description of Artificial Sequence: Synthetic oligonucleotide"
gaacugucauaagauaugaga

SEQ ID NO: 1786 - RNA, 21 nt, Artificial Sequence
  source: /note="Description of Artificial Sequence: Synthetic oligonucleotide"
aacugucauaagauaugagca

SEQ ID NO: 1787 - RNA, 21 nt, Artificial Sequence
  source: /note="Description of Artificial Sequence: Synthetic oligonucleotide"
cugucauaagauaugagcuga

SEQ ID NO: 1788 - RNA, 21 nt, Artificial Sequence
  source: /note="Description of Artificial Sequence: Synthetic oligonucleotide"
uaagauaugagcugaauacca

SEQ ID NO: 1789 - RNA, 21 nt, Artificial Sequence
  source: /note="Description of Artificial Sequence: Synthetic oligonucleotide"
agauaugagcugaauaccgaa

SEQ ID NO: 1790 - RNA, 21 nt, Artificial Sequence
  source: /note="Description of Artificial Sequence: Synthetic oligonucleotide"
auaugagcugaauaccgagaa

SEQ ID NO: 1791 - RNA, 21 nt, Artificial Sequence
  source: /note="Description of Artificial Sequence: Synthetic oligonucleotide"
cacggacaguucccguauuca

SEQ ID NO: 1792 - RNA, 21 nt, Artificial Sequence
  source: /note="Description of Artificial Sequence: Synthetic oligonucleotide"
acggacaguucccguauucua

SEQ ID NO: 1793 - RNA, 21 nt, Artificial Sequence
  source: /note="Description of Artificial Sequence: Synthetic oligonucleotide"
ggacaguucccguauucuuga

SEQ ID NO: 1794 - RNA, 21 nt, Artificial Sequence
  source: /note="Description of Artificial Sequence: Synthetic oligonucleotide"
uaccgucaacuuugcuuauga

SEQ ID NO: 1795 - RNA, 21 nt, Artificial Sequence
  source: /note="Description of Artificial Sequence: Synthetic oligonucleotide"
accgucaacuuugcuuaugaa

SEQ ID NO: 1796 - RNA, 21 nt, Artificial Sequence
  source: /note="Description of Artificial Sequence: Synthetic oligonucleotide"
ccgucaacuuugcuuaugaca

SEQ ID NO: 1797 - RNA, 21 nt, Artificial Sequence
  source: /note="Description of Artificial Sequence: Synthetic oligonucleotide"
cgucaacuuugcuuaugacaa

SEQ ID NO: 1798 - RNA, 21 nt, Artificial Sequence
  source: /note="Description of Artificial Sequence: Synthetic oligonucleotide"
auaaguacagcagcaugauua

SEQ ID NO: 1799 - RNA, 21 nt, Artificial Sequence
  source: /note="Description of Artificial Sequence: Synthetic oligonucleotide"
uaaguacagcagcaugauuga

SEQ ID NO: 1800 - RNA, 21 nt, Artificial Sequence
  source: /note="Description of Artificial Sequence: Synthetic oligonucleotide"
guacagcagcaugauugacua

SEQ ID NO: 1801 - RNA, 21 nt, Artificial Sequence
  source: /note="Description of Artificial Sequence: Synthetic oligonucleotide"
uuugccugggacaacuugaaa

SEQ ID NO: 1802 - RNA, 21 nt, Artificial Sequence
  source: /note="Description of Artificial Sequence: Synthetic oligonucleotide"
cuugaacauggucacuuauga

SEQ ID NO: 1803 - RNA, 21 nt, Artificial Sequence
  source: /note="Description of Artificial Sequence: Synthetic oligonucleotide"
uugaacauggucacuuaugaa

SEQ ID NO: 1804 - RNA, 21 nt, Artificial Sequence
  source: /note="Description of Artificial Sequence: Synthetic oligonucleotide"
ugaacauggucacuuaugaca

SEQ ID NO: 1805 - RNA, 21 nt, Artificial Sequence
  source: /note="Description of Artificial Sequence: Synthetic oligonucleotide"
gaacauggucacuuaugacaa

SEQ ID NO: 1806 - RNA, 21 nt, Artificial Sequence
  source: /note="Description of Artificial Sequence: Synthetic oligonucleotide"
uggucacuuaugacaucaaga

SEQ ID NO: 1807 - RNA, 21 nt, Artificial Sequence
  source: /note="Description of Artificial Sequence: Synthetic oligonucleotide"
ggucacuuaugacaucaagca

SEQ ID NO: 1808 - RNA, 21 nt, Artificial Sequence
  source: /note="Description of Artificial Sequence: Synthetic oligonucleotide"
gucacuuaugacaucaagcua

SEQ ID NO: 1809 - RNA, 21 nt, Artificial Sequence
  source: /note="Description of Artificial Sequence: Synthetic oligonucleotide"
ucacuuaugacaucaagcuca

SEQ ID NO: 1810 - RNA, 21 nt, Artificial Sequence
  source: /note="Description of Artificial Sequence: Synthetic oligonucleotide"
caucaagcucuccaagaugua

SEQ ID NO: 1811 - RNA, 21 nt, Artificial Sequence
  source: /note="Description of Artificial Sequence: Synthetic oligonucleotide"
gcucuccaagaugugaaaaga

SEQ ID NO: 1812 - RNA, 21 nt, Artificial Sequence
  source: /note="Description of Artificial Sequence: Synthetic oligonucleotide"
ucuccaagaugugaaaagcca

SEQ ID NO: 1813 - RNA, 21 nt, Artificial Sequence
  source: /note="Description of Artificial Sequence: Synthetic oligonucleotide"
uucaggaauuguagucugaga

SEQ ID NO: 1814 - RNA, 21 nt, Artificial Sequence
  source: /note="Description of Artificial Sequence: Synthetic oligonucleotide"
uaucuucugucagcauuuaua

SEQ ID NO: 1815 - RNA, 21 nt, Artificial Sequence
  source: /note="Description of Artificial Sequence: Synthetic oligonucleotide"
aucuucugucagcauuuauga

SEQ ID NO: 1816 - RNA, 21 nt, Artificial Sequence
  source: /note="Description of Artificial Sequence: Synthetic oligonucleotide"
ucuucugucagcauuuaugga

SEQ ID NO: 1817 - RNA, 21 nt, Artificial Sequence
  source: /note="Description of Artificial Sequence: Synthetic oligonucleotide"
cuucugucagcauuuauggga

SEQ ID NO: 1818 - RNA, 21 nt, Artificial Sequence
  source: /note="Description of Artificial Sequence: Synthetic oligonucleotide"
ucugucagcauuuaugggaua

SEQ ID NO: 1819 - RNA, 21 nt, Artificial Sequence
  source: /note="Description of Artificial Sequence: Synthetic oligonucleotide"
cugucagcauuuaugggauga

SEQ ID NO: 1820 - RNA, 21 nt, Artificial Sequence
  source: /note="Description of Artificial Sequence: Synthetic oligonucleotide"
ucagcauuuaugggauguuua

SEQ ID NO: 1821 - RNA, 21 nt, Artificial Sequence
  source: /note="Description of Artificial Sequence: Synthetic oligonucleotide"
cagcauuuaugggauguuuaa

SEQ ID NO: 1822 - RNA, 21 nt, Artificial Sequence
  source: /note="Description of Artificial Sequence: Synthetic oligonucleotide"
agcauuuaugggauguuuaaa

SEQ ID NO: 1823 - RNA, 21 nt, Artificial Sequence
  source: /note="Description of Artificial Sequence: Synthetic oligonucleotide"
cauuuaugggauguuuaauga

SEQ ID NO: 1824 - RNA, 21 nt, Artificial Sequence
  source: /note="Description of Artificial Sequence: Synthetic oligonucleotide"
auuuaugggauguuuaaugaa

SEQ ID NO: 1825 - RNA, 21 nt, Artificial Sequence
  source: /note="Description of Artificial Sequence: Synthetic oligonucleotide"
ggauguuuaaugacauaguua

SEQ ID NO: 1826 - RNA, 21 nt, Artificial Sequence
  source: /note="Description of Artificial Sequence: Synthetic oligonucleotide"
gauguuuaaugacauaguuca

SEQ ID NO: 1827 - RNA, 21 nt, Artificial Sequence
  source: /note="Description of Artificial Sequence: Synthetic oligonucleotide"
auguuuaaugacauaguucaa

SEQ ID NO: 1828 - RNA, 21 nt, Artificial Sequence
  source: /note="Description of Artificial Sequence: Synthetic oligonucleotide"
guuuaaugacauaguucaaga

SEQ ID NO: 1829 - RNA, 21 nt, Artificial Sequence
  source: /note="Description of Artificial Sequence: Synthetic oligonucleotide"
uuuaaugacauaguucaagua

SEQ ID NO: 1830 - RNA, 21 nt, Artificial Sequence
  source: /note="Description of Artificial Sequence: Synthetic oligonucleotide"
ugacauaguucaaguuuucua

SEQ ID NO: 1831 - RNA, 21 nt, Artificial Sequence
  source: /note="Description of Artificial Sequence: Synthetic oligonucleotide"
gacauaguucaaguuuucuua

SEQ ID NO: 1832 - RNA, 21 nt, Artificial Sequence
  source: /note="Description of Artificial Sequence: Synthetic oligonucleotide"
acauaguucaaguuuucuuga

SEQ ID NO: 1833 - RNA, 21 nt, Artificial Sequence
  source: /note="Description of Artificial Sequence: Synthetic oligonucleotide"
cauaguucaaguuuucuugua

SEQ ID NO: 1834 - RNA, 21 nt, Artificial Sequence
  source: /note="Description of Artificial Sequence: Synthetic oligonucleotide"
auaguucaaguuuucuuguga

SEQ ID NO: 1835 - RNA, 21 nt, Artificial Sequence
  source: /note="Description of Artificial Sequence: Synthetic oligonucleotide"
uaguucaaguuuucuugugaa

SEQ ID NO: 1836 - RNA, 21 nt, Artificial Sequence
  source: /note="Description of Artificial Sequence: Synthetic oligonucleotide"
aguucaaguuuucuugugaua

SEQ ID NO: 1837 - RNA, 21 nt, Artificial Sequence
  source: /note="Description of Artificial Sequence: Synthetic oligonucleotide"
guucaaguuuucuugugauua

SEQ ID NO: 1838 - RNA, 21 nt, Artificial Sequence
  source: /note="Description of Artificial Sequence: Synthetic oligonucleotide"
ucaaguuuucuugugauuuga

SEQ ID NO: 1839 - RNA, 21 nt, Artificial Sequence
  source: /note="Description of Artificial Sequence: Synthetic oligonucleotide"
auaguuucuuccugaaaacca

SEQ ID NO: 1840 - RNA, 21 nt, Artificial Sequence
  source: /note="Description of Artificial Sequence: Synthetic oligonucleotide"
uucuuccugaaaaccauugca

SEQ ID NO: 1841 - RNA, 21 nt, Artificial Sequence
  source: /note="Description of Artificial Sequence: Synthetic oligonucleotide"
ucuuccugaaaaccauugcua

SEQ ID NO: 1842 - RNA, 21 nt, Artificial Sequence
  source: /note="Description of Artificial Sequence: Synthetic oligonucleotide"
uuccugaaaaccauugcucua

SEQ ID NO: 1843 - RNA, 21 nt, Artificial Sequence
  source: /note="Description of Artificial Sequence: Synthetic oligonucleotide"
gaaaaccauugcucuugcaua

SEQ ID NO: 1844 - RNA, 21 nt, Artificial Sequence
  source: /note="Description of Artificial Sequence: Synthetic oligonucleotide"
aaaaccauugcucuugcauga

SEQ ID NO: 1845 - RNA, 21 nt, Artificial Sequence
  source: /note="Description of Artificial Sequence: Synthetic oligonucleotide"
aaccauugcucuugcauguua

SEQ ID NO: 1846 - RNA, 21 nt, Artificial Sequence
  source: /note="Description of Artificial Sequence: Synthetic oligonucleotide"
accauugcucuugcauguuaa

SEQ ID NO: 1847 - RNA, 21 nt, Artificial Sequence
  source: /note="Description of Artificial Sequence: Synthetic oligonucleotide"
ccauugcucuugcauguuaca

SEQ ID NO: 1848 - RNA, 21 nt, Artificial Sequence
  source: /note="Description of Artificial Sequence: Synthetic oligonucleotide"
cauugcucuugcauguuacaa

SEQ ID NO: 1849 - RNA, 21 nt, Artificial Sequence
  source: /note="Description of Artificial Sequence: Synthetic oligonucleotide"
auugcucuugcauguuacaua

SEQ ID NO: 1850 - RNA, 21 nt, Artificial Sequence
  source: /note="Description of Artificial Sequence: Synthetic oligonucleotide"
uugcucuugcauguuacauga

SEQ ID NO: 1851 - RNA, 21 nt, Artificial Sequence
  source: /note="Description of Artificial Sequence: Synthetic oligonucleotide"
ugcucuugcauguuacaugga

SEQ ID NO: 1852 - RNA, 21 nt, Artificial Sequence
  source: /note="Description of Artificial Sequence: Synthetic oligonucleotide"
gcucuugcauguuacauggua

SEQ ID NO: 1853 - RNA, 21 nt, Artificial Sequence
  source: /note="Description of Artificial Sequence: Synthetic oligonucleotide"
cucuugcauguuacaugguua

SEQ ID NO: 1854 - RNA, 21 nt, Artificial Sequence
  source: /note="Description of Artificial Sequence: Synthetic oligonucleotide"
ucuugcauguuacaugguuaa

SEQ ID NO: 1855 - RNA, 21 nt, Artificial Sequence
  source: /note="Description of Artificial Sequence: Synthetic oligonucleotide"
cuugcauguuacaugguuaca

SEQ ID NO: 1856 - RNA, 21 nt, Artificial Sequence
  source: /note="Description of Artificial Sequence: Synthetic oligonucleotide"
uugcauguuacaugguuacca

SEQ ID NO: 1857 - RNA, 21 nt, Artificial Sequence
  source: /note="Description of Artificial Sequence: Synthetic oligonucleotide"
ugcauguuacaugguuaccaa

SEQ ID NO: 1858 - RNA, 21 nt, Artificial Sequence
  source: /note="Description of Artificial Sequence: Synthetic oligonucleotide"
gcauguuacaugguuaccaca

SEQ ID NO: 1859 - RNA, 21 nt, Artificial Sequence
  source: /note="Description of Artificial Sequence: Synthetic oligonucleotide"
aaaagcauaacuucuaaagga

SEQ ID NO: 1860 - RNA, 21 nt, Artificial Sequence
  source: /note="Description of Artificial Sequence: Synthetic oligonucleotide"
aaagcauaacuucuaaaggaa

SEQ ID NO: 1861 - RNA, 21 nt, Artificial Sequence
  source: /note="Description of Artificial Sequence: Synthetic oligonucleotide"
aagcauaacuucuaaaggaaa

SEQ ID NO: 1862 - RNA, 21 nt, Artificial Sequence
  source: /note="Description of Artificial Sequence: Synthetic oligonucleotide"
agcauaacuucuaaaggaaga

SEQ ID NO: 1863 - RNA, 21 nt, Artificial Sequence
  source: /note="Description of Artificial Sequence: Synthetic oligonucleotide"
uucuaaaggaagcagaauaga

SEQ ID NO: 1864 - RNA, 21 nt, Artificial Sequence
  source: /note="Description of Artificial Sequence: Synthetic oligonucleotide"
ucuaaaggaagcagaauagca

SEQ ID NO: 1865 - RNA, 21 nt, Artificial Sequence
  source: /note="Description of Artificial Sequence: Synthetic oligonucleotide"
cuaaaggaagcagaauagcua

SEQ ID NO: 1866 - RNA, 21 nt, Artificial Sequence
  source: /note="Description of Artificial Sequence: Synthetic oligonucleotide"
aaguaagaugcauuuacuaca

SEQ ID NO: 1867 - RNA, 21 nt, Artificial Sequence
  source: /note="Description of Artificial Sequence: Synthetic oligonucleotide"
guuggcuucuaaugcuucaga

SEQ ID NO: 1868 - RNA, 21 nt, Artificial Sequence
  source: /note="Description of Artificial Sequence: Synthetic oligonucleotide"
gcuucuaaugcuucagauaga

SEQ ID NO: 1869 - RNA, 21 nt, Artificial Sequence
  source: /note="Description of Artificial Sequence: Synthetic oligonucleotide"
uucuaaugcuucagauagaaa

SEQ ID NO: 1870 - RNA, 21 nt, Artificial Sequence
  source: /note="Description of Artificial Sequence: Synthetic oligonucleotide"
ucuaaugcuucagauagaaua

SEQ ID NO: 1871 - RNA, 21 nt, Artificial Sequence
  source: /note="Description of Artificial Sequence: Synthetic oligonucleotide"
augcuucagauagaauacaga

SEQ ID NO: 1872 - RNA, 21 nt, Artificial Sequence
  source: /note="Description of Artificial Sequence: Synthetic oligonucleotide"
ugcuucagauagaauacagua

SEQ ID NO: 1873 - RNA, 21 nt, Artificial Sequence
  source: /note="Description of Artificial Sequence: Synthetic oligonucleotide"
cuucagauagaauacaguuga

SEQ ID NO: 1874 - RNA, 21 nt, Artificial Sequence
  source: /note="Description of Artificial Sequence: Synthetic oligonucleotide"
uucagauagaauacaguugga

SEQ ID NO: 1875 - RNA, 23 nt, Artificial Sequence
  source: /note="Description of Artificial Sequence: Synthetic oligonucleotide"
uuccagaacugacuugucucgga

SEQ ID NO: 1876 - RNA, 23 nt, Artificial Sequence
  source: /note="Description of Artificial Sequence: Synthetic oligonucleotide"
uguagaaacuucucuggagccug

SEQ ID NO: 1877 - DNA, 23 bp, Artificial Sequence
  source: /note="Description of Artificial Sequence: Synthetic oligonucleotide"
  source: /note="Description of Combined DNA/RNA Molecule: Synthetic oligonucleotide"
ucaaagtguccaaauuccacgua

SEQ ID NO: 1878 - RNA, 23 nt, Artificial Sequence
  source: /note="Description of Artificial Sequence: Synthetic oligonucleotide"
uccaaaguguccaaauuccacgu

SEQ ID NO: 1879 - RNA, 23 nt, Artificial Sequence
  source: /note="Description of Artificial Sequence: Synthetic oligonucleotide"
uucggacuucaguuccuggaagg

SEQ ID NO: 1880 - DNA, 23 bp, Artificial Sequence
  source: /note="Description of Artificial Sequence: Synthetic oligonucleotide"
  source: /note="Description of Combined DNA/RNA Molecule: Synthetic oligonucleotide"
uucagutagcucggacuucaguu

SEQ ID NO: 1881 - RNA, 23 nt, Artificial Sequence
  source: /note="Description of Artificial Sequence: Synthetic oligonucleotide"
uacuucaguuagcucggacuuca

SEQ ID NO: 1882 - RNA, 23 nt, Artificial Sequence
  source: /note="Description of Artificial Sequence: Synthetic oligonucleotide"
uaacuucaguuagcucggacuuc

SEQ ID NO: 1883 - DNA, 23 bp, Artificial Sequence
  source: /note="Description of Artificial Sequence: Synthetic oligonucleotide"
  source: /note="Description of Combined DNA/RNA Molecule: Synthetic oligonucleotide"
ugaacutcaguuagcucggacuu

SEQ ID NO: 1884 - DNA, 23 bp, Artificial Sequence
  source: /note="Description of Artificial Sequence: Synthetic oligonucleotide"
  source: /note="Description of Combined DNA/RNA Molecule: Synthetic oligonucleotide"
uggaactucaguuagcucggacu

SEQ ID NO: 1885 - RNA, 23 nt, Artificial Sequence
  source: /note="Description of Artificial Sequence: Synthetic oligonucleotide"
uaggaacuucaguuagcucggac

SEQ ID NO: 1886 - RNA, 23 nt, Artificial Sequence
  source: /note="Description of Artificial Sequence: Synthetic oligonucleotide"
ucaggaacuucaguuagcucgga

SEQ ID NO: 1887 - RNA, 23 nt, Artificial Sequence
  source: /note="Description of Artificial Sequence: Synthetic oligonucleotide"
uaauucgggaagcaggaacuuca

SEQ ID NO: 1888 - RNA, 23 nt, Artificial Sequence
  source: /note="Description of Artificial Sequence: Synthetic oligonucleotide"
uaaauucgggaagcaggaacuuc

SEQ ID NO: 1889 - DNA, 23 bp, Artificial Sequence
  source: /note="Description of Artificial Sequence: Synthetic oligonucleotide"
  source: /note="Description of Combined DNA/RNA Molecule: Synthetic oligonucleotide"
uaaaautcgggaagcaggaacuu

SEQ ID NO: 1890 - DNA, 23 bp, Artificial Sequence
  source: /note="Description of Artificial Sequence: Synthetic oligonucleotide"
  source: /note="Description of Combined DNA/RNA Molecule: Synthetic oligonucleotide"
ucaaaatucgggaagcaggaacu

SEQ ID NO: 1891 - RNA, 23 nt, Artificial Sequence
  source: /note="Description of Artificial Sequence: Synthetic oligonucleotide"
uucaaaauucgggaagcaggaac

SEQ ID NO: 1892 - RNA, 23 nt, Artificial Sequence
  source: /note="Description of Artificial Sequence: Synthetic oligonucleotide"
uuucaaaauucgggaagcaggaa

SEQ ID NO: 1893 - RNA, 23 nt, Artificial Sequence
  source: /note="Description of Artificial Sequence: Synthetic oligonucleotide"
ucuucaaaauucgggaagcagga

SEQ ID NO: 1894 - DNA, 23 bp, Artificial Sequence
  source: /note="Description of Artificial Sequence: Synthetic oligonucleotide"
  source: /note="Description of Combined DNA/RNA Molecule: Synthetic oligonucleotide"
ucuccutcaaaauucgggaagca

SEQ ID NO: 1895 - RNA, 23 nt, Artificial Sequence
  source: /note="Description of Artificial Sequence: Synthetic oligonucleotide"
uaaacuaguucuccacauccggu

SEQ ID NO: 1896 - DNA, 23 bp, Artificial Sequence
  source: /note="Description of Artificial Sequence: Synthetic oligonucleotide"
  source: /note="Description of Combined DNA/RNA Molecule: Synthetic oligonucleotide"
ucaaactaguucuccacauccgg

SEQ ID NO: 1897 - RNA, 23 nt, Artificial Sequence
  source: /note="Description of Artificial Sequence: Synthetic oligonucleotide"
uacccaaacuaguucuccacauc

SEQ ID NO: 1898 - RNA, 23 nt, Artificial Sequence
  source: /note="Description of Artificial Sequence: Synthetic oligonucleotide"
ucaguaauuguuucugcuguucu

SEQ ID NO: 1899 - RNA, 23 nt, Artificial Sequence
  source: /note="Description of Artificial Sequence: Synthetic oligonucleotide"
uccaguaauuguuucugcuguuc

SEQ ID NO: 1900 - DNA, 23 bp, Artificial Sequence
  source: /note="Description of Artificial Sequence: Synthetic oligonucleotide"
  source: /note="Description of Combined DNA/RNA Molecule: Synthetic oligonucleotide"
ugccagtaauuguuucugcuguu

SEQ ID NO: 1901 - RNA, 23 nt, Artificial Sequence
  source: /note="Description of Artificial Sequence: Synthetic oligonucleotide"
ucuugccaguaauuguuucugcu

SEQ ID NO: 1902 - DNA, 23 bp, Artificial Sequence
  source: /note="Description of Artificial Sequence: Synthetic oligonucleotide"
  source: /note="Description of Combined DNA/RNA Molecule: Synthetic oligonucleotide"
uauacutgccaguaauuguuucu

SEQ ID NO: 1903 - DNA, 23 bp, Artificial Sequence
  source: /note="Description of Artificial Sequence: Synthetic oligonucleotide"
  source: /note="Description of Combined DNA/RNA Molecule: Synthetic oligonucleotide"
ucauactugccaguaauuguuuc

SEQ ID NO: 1904 - RNA, 23 nt, Artificial Sequence
  source: /note="Description of Artificial Sequence: Synthetic oligonucleotide"
uacacaccauacuugccaguaau

SEQ ID NO: 1905 - RNA, 23 nt, Artificial Sequence
  source: /note="Description of Artificial Sequence: Synthetic oligonucleotide"
uauacucaaaaaccuggcggaca

SEQ ID NO: 1906 - RNA, 23 nt, Artificial Sequence
  source: /note="Description of Artificial Sequence: Synthetic oligonucleotide"
uucauacucaaaaaccuggcgga

SEQ ID NO: 1907 - RNA, 23 nt, Artificial Sequence
  source: /note="Description of Artificial Sequence: Synthetic oligonucleotide"
ucugaugaggucauacucaaaaa

SEQ ID NO: 1908 - RNA, 23 nt, Artificial Sequence
  source: /note="Description of Artificial Sequence: Synthetic oligonucleotide"
uauaaacuggcugaugaggucau

SEQ ID NO: 1909 - RNA, 23 nt, Artificial Sequence
  source: /note="Description of Artificial Sequence: Synthetic oligonucleotide"
ucauaaacuggcugaugagguca

SEQ ID NO: 1910 - RNA, 23 nt, Artificial Sequence
  source: /note="Description of Artificial Sequence: Synthetic oligonucleotide"
ugugaaccuuagaaggguagccc

SEQ ID NO: 1911 - DNA, 23 bp, Artificial Sequence
  source: /note="Description of Artificial Sequence: Synthetic oligonucleotide"
  source: /note="Description of Combined DNA/RNA Molecule: Synthetic oligonucleotide"
ucaguatgugaaccuuagaaggg

SEQ ID NO: 1912 - RNA, 23 nt, Artificial Sequence
  source: /note="Description of Artificial Sequence: Synthetic oligonucleotide"
ugcaguaugugaaccuuagaagg

SEQ ID NO: 1913 - DNA, 23 bp, Artificial Sequence
  source: /note="Description of Artificial Sequence: Synthetic oligonucleotide"
  source: /note="Description of Combined DNA/RNA Molecule: Synthetic oligonucleotide"
uggcagtaugugaaccuuagaag

SEQ ID NO: 1914 - RNA, 23 nt, Artificial Sequence
  source: /note="Description of Artificial Sequence: Synthetic oligonucleotide"
ucuuaugacaguucuggacucag

SEQ ID NO: 1915 - DNA, 23 bp, Artificial Sequence
  source: /note="Description of Artificial Sequence: Synthetic oligonucleotide"
  source: /note="Description of Combined DNA/RNA Molecule: Synthetic oligonucleotide"
uucuuatgacaguucuggacuca

SEQ ID NO: 1916 - RNA, 23 nt, Artificial Sequence
  source: /note="Description of Artificial Sequence: Synthetic oligonucleotide"
uaucuuaugacaguucuggacuc

SEQ ID NO: 1917 - RNA, 23 nt, Artificial Sequence
  source: /note="Description of Artificial Sequence: Synthetic oligonucleotide"
ucauaucuuaugacaguucugga

SEQ ID NO: 1918 - DNA, 23 bp, Artificial Sequence
  source: /note="Description of Artificial Sequence: Synthetic oligonucleotide"
  source: /note="Description of Combined DNA/RNA Molecule: Synthetic oligonucleotide"
uucauatcuuaugacaguucugg

SEQ ID NO: 1919 - RNA, 23 nt, Artificial Sequence
  source: /note="Description of Artificial Sequence: Synthetic oligonucleotide"
ucucauaucuuaugacaguucug

SEQ ID NO: 1920 - DNA, 23 bp, Artificial Sequence
  source: /note="Description of Artificial Sequence: Synthetic oligonucleotide"
  source: /note="Description of Combined DNA/RNA Molecule: Synthetic oligonucleotide"
ugcucataucuuaugacaguucu

SEQ ID NO: 1921 - RNA, 23 nt, Artificial Sequence
  source: /note="Description of Artificial Sequence: Synthetic oligonucleotide"
ucagcucauaucuuaugacaguu

SEQ ID NO: 1922 - DNA, 23 bp, Artificial Sequence
  source: /note="Description of Artificial Sequence: Synthetic oligonucleotide"
  source: /note="Description of Combined DNA/RNA Molecule: Synthetic oligonucleotide"
ugguautcagcucauaucuuaug

SEQ ID NO: 1923 - RNA, 23 nt, Artificial Sequence
  source: /note="Description of Artificial Sequence: Synthetic oligonucleotide"
uucgguauucagcucauaucuua

SEQ ID NO: 1924 - RNA, 23 nt, Artificial Sequence
  source: /note="Description of Artificial Sequence: Synthetic oligonucleotide"
uucucgguauucagcucauaucu

SEQ ID NO: 1925 - RNA, 23 nt, Artificial Sequence
  source: /note="Description of Artificial Sequence: Synthetic oligonucleotide"
ugaauacgggaacuguccguggu

SEQ ID NO: 1926 - RNA, 23 nt, Artificial Sequence
  source: /note="Description of Artificial Sequence: Synthetic oligonucleotide"
uagaauacgggaacuguccgugg

SEQ ID NO: 1927 - RNA, 23 nt, Artificial Sequence
  source: /note="Description of Artificial Sequence: Synthetic oligonucleotide"
ucaagaauacgggaacuguccgu

SEQ ID NO: 1928 - RNA, 23 nt, Artificial Sequence
  source: /note="Description of Artificial Sequence: Synthetic oligonucleotide"
ucauaagcaaaguugacgguagc

SEQ ID NO: 1929 - RNA, 23 nt, Artificial Sequence
  source: /note="Description of Artificial Sequence: Synthetic oligonucleotide"
uucauaagcaaaguugacgguag

SEQ ID NO: 1930 - RNA, 23 nt, Artificial Sequence
  source: /note="Description of Artificial Sequence: Synthetic oligonucleotide"
ugucauaagcaaaguugacggua

SEQ ID NO: 1931 - DNA, 23 bp, Artificial Sequence
  source: /note="Description of Artificial Sequence: Synthetic oligonucleotide"
  source: /note="Description of Combined DNA/RNA Molecule: Synthetic oligonucleotide"
uugucataagcaaaguugacggu

SEQ ID NO: 1932 - DNA, 23 bp, Artificial Sequence
  source: /note="Description of Artificial Sequence: Synthetic oligonucleotide"
  source: /note="Description of Combined DNA/RNA Molecule: Synthetic oligonucleotide"
uaaucatgcugcuguacuuauag

SEQ ID NO: 1933 - RNA, 23 nt, Artificial Sequence
  source: /note="Description of Artificial Sequence: Synthetic oligonucleotide"
ucaaucaugcugcuguacuuaua

SEQ ID NO: 1934 - RNA, 23 nt, Artificial Sequence
  source: /note="Description of Artificial Sequence: Synthetic oligonucleotide"
uagucaaucaugcugcuguacuu

SEQ ID NO: 1935 - RNA, 23 nt, Artificial Sequence
  source: /note="Description of Artificial Sequence: Synthetic oligonucleotide"
uuucaaguugucccaggcaaaga

SEQ ID NO: 1936 - RNA, 23 nt, Artificial Sequence
  source: /note="Description of Artificial Sequence: Synthetic oligonucleotide"
ucauaagugaccauguucaaguu

SEQ ID NO: 1937 - RNA, 23 nt, Artificial Sequence
  source: /note="Description of Artificial Sequence: Synthetic oligonucleotide"
uucauaagugaccauguucaagu

SEQ ID NO: 1938 - RNA, 23 nt, Artificial Sequence
  source: /note="Description of Artificial Sequence: Synthetic oligonucleotide"
ugucauaagugaccauguucaag

SEQ ID NO: 1939 - DNA, 23 bp, Artificial Sequence
  source: /note="Description of Artificial Sequence: Synthetic oligonucleotide"
  source: /note="Description of Combined DNA/RNA Molecule: Synthetic oligonucleotide"
uugucataagugaccauguucaa

SEQ ID NO: 1940 - DNA, 23 bp, Artificial Sequence
  source: /note="Description of Artificial Sequence: Synthetic oligonucleotide"
  source: /note="Description of Combined DNA/RNA Molecule: Synthetic oligonucleotide"
ucuugatgucauaagugaccaug

SEQ ID NO: 1941 - RNA, 23 nt, Artificial Sequence
  source: /note="Description of Artificial Sequence: Synthetic oligonucleotide"
ugcuugaugucauaagugaccau

SEQ ID NO: 1942 - RNA, 23 nt, Artificial Sequence
  source: /note="Description of Artificial Sequence: Synthetic oligonucleotide"
uagcuugaugucauaagugacca

SEQ ID NO: 1943 - DNA, 23 bp, Artificial Sequence
  source: /note="Description of Artificial Sequence: Synthetic oligonucleotide"
  source: /note="Description of Combined DNA/RNA Molecule: Synthetic oligonucleotide"
ugagcutgaugucauaagugacc

SEQ ID NO: 1944 - DNA, 23 bp, Artificial Sequence
  source: /note="Description of Artificial Sequence: Synthetic oligonucleotide"
  source: /note="Description of Combined DNA/RNA Molecule: Synthetic oligonucleotide"
uacauctuggagagcuugauguc

SEQ ID NO: 1945 - RNA, 23 nt, Artificial Sequence
  source: /note="Description of Artificial Sequence: Synthetic oligonucleotide"
ucuuuucacaucuuggagagcuu

SEQ ID NO: 1946 - DNA, 23 bp, Artificial Sequence
  source: /note="Description of Artificial Sequence: Synthetic oligonucleotide"
  source: /note="Description of Combined DNA/RNA Molecule: Synthetic oligonucleotide"
uggcuutucacaucuuggagagc

SEQ ID NO: 1947 - RNA, 23 nt, Artificial Sequence
  source: /note="Description of Artificial Sequence: Synthetic oligonucleotide"
ucucagacuacaauuccugaaua

SEQ ID NO: 1948 - DNA, 23 bp, Artificial Sequence
  source: /note="Description of Artificial Sequence: Synthetic oligonucleotide"
  source: /note="Description of Combined DNA/RNA Molecule: Synthetic oligonucleotide"
uauaaatgcugacagaagauaaa

SEQ ID NO: 1949 - RNA, 23 nt, Artificial Sequence
  source: /note="Description of Artificial Sequence: Synthetic oligonucleotide"
ucauaaaugcugacagaagauaa

SEQ ID NO: 1950 - RNA, 23 nt, Artificial Sequence
  source: /note="Description of Artificial Sequence: Synthetic oligonucleotide"
uccauaaaugcugacagaagaua

SEQ ID NO: 1951 - RNA, 23 nt, Artificial Sequence
  source: /note="Description of Artificial Sequence: Synthetic oligonucleotide"
ucccauaaaugcugacagaagau

SEQ ID NO: 1952 - RNA, 23 nt, Artificial Sequence
  source: /note="Description of Artificial Sequence: Synthetic oligonucleotide"
uaucccauaaaugcugacagaag

SEQ ID NO: 1953 - RNA, 23 nt, Artificial Sequence
  source: /note="Description of Artificial Sequence: Synthetic oligonucleotide"
ucaucccauaaaugcugacagaa

SEQ ID NO: 1954 - DNA, 23 bp, Artificial Sequence
  source: /note="Description of Artificial Sequence: Synthetic oligonucleotide"
  source: /note="Description of Combined DNA/RNA Molecule: Synthetic oligonucleotide"
uaaacatcccauaaaugcugaca

SEQ ID NO: 1955 - RNA, 23 nt, Artificial Sequence
  source: /note="Description of Artificial Sequence: Synthetic oligonucleotide"
uuaaacaucccauaaaugcugac

SEQ ID NO: 1956 - RNA, 23 nt, Artificial Sequence
  source: /note="Description of Artificial Sequence: Synthetic oligonucleotide"
uuuaaacaucccauaaaugcuga

SEQ ID NO: 1957 - RNA, 23 nt, Artificial Sequence
  source: /note="Description of Artificial Sequence: Synthetic oligonucleotide"
ucauuaaacaucccauaaaugcu

SEQ ID NO: 1958 - RNA, 23 nt, Artificial Sequence
  source: /note="Description of Artificial Sequence: Synthetic oligonucleotide"
uucauuaaacaucccauaaaugc

SEQ ID NO: 1959 - DNA, 23 bp, Artificial Sequence
  source: /note="Description of Artificial Sequence: Synthetic oligonucleotide"
  source: /note="Description of Combined DNA/RNA Molecule: Synthetic oligonucleotide"
uaacuatgucauuaaacauccca

SEQ ID NO: 1960 - RNA, 23 nt, Artificial Sequence
  source: /note="Description of Artificial Sequence: Synthetic oligonucleotide"
ugaacuaugucauuaaacauccc

SEQ ID NO: 1961 - DNA, 23 bp, Artificial Sequence
  source: /note="Description of Artificial Sequence: Synthetic oligonucleotide"
  source: /note="Description of Combined DNA/RNA Molecule: Synthetic oligonucleotide"
uugaactaugucauuaaacaucc

SEQ ID NO: 1962 - RNA, 23 nt, Artificial Sequence
  source: /note="Description of Artificial Sequence: Synthetic oligonucleotide"
ucuugaacuaugucauuaaacau

SEQ ID NO: 1963 - RNA, 23 nt, Artificial Sequence
  source: /note="Description of Artificial Sequence: Synthetic oligonucleotide"
uacuugaacuaugucauuaaaca

SEQ ID NO: 1964 - RNA, 23 nt, Artificial Sequence
  source: /note="Description of Artificial Sequence: Synthetic oligonucleotide"
uagaaaacuugaacuaugucauu

SEQ ID NO: 1965 - RNA, 23 nt, Artificial Sequence
  source: /note="Description of Artificial Sequence: Synthetic oligonucleotide"
uaagaaaacuugaacuaugucau

SEQ ID NO: 1966 - RNA, 23 nt, Artificial Sequence
  source: /note="Description of Artificial Sequence: Synthetic oligonucleotide"
ucaagaaaacuugaacuauguca

SEQ ID NO: 1967 - RNA, 23 nt, Artificial Sequence
  source: /note="Description of Artificial Sequence: Synthetic oligonucleotide"
uacaagaaaacuugaacuauguc

SEQ ID NO: 1968 - RNA, 23 nt, Artificial Sequence
  source: /note="Description of Artificial Sequence: Synthetic oligonucleotide"
ucacaagaaaacuugaacuaugu

SEQ ID NO: 1969 - RNA, 23 nt, Artificial Sequence
  source: /note="Description of Artificial Sequence: Synthetic oligonucleotide"
uucacaagaaaacuugaacuaug

SEQ ID NO: 1970 - RNA, 23 nt, Artificial Sequence
  source: /note="Description of Artificial Sequence: Synthetic oligonucleotide"
uaucacaagaaaacuugaacuau

SEQ ID NO: 1971 - RNA, 23 nt, Artificial Sequence
  source: /note="Description of Artificial Sequence: Synthetic oligonucleotide"
uaaucacaagaaaacuugaacua

SEQ ID NO: 1972 - RNA, 23 nt, Artificial Sequence
  source: /note="Description of Artificial Sequence: Synthetic oligonucleotide"
ucaaaucacaagaaaacuugaac

SEQ ID NO: 1973 - DNA, 23 bp, Artificial Sequence
  source: /note="Description of Artificial Sequence: Synthetic oligonucleotide"
  source: /note="Description of Combined DNA/RNA Molecule: Synthetic oligonucleotide"
ugguuutcaggaagaaacuauua

SEQ ID NO: 1974 - RNA, 23 nt, Artificial Sequence
  source: /note="Description of Artificial Sequence: Synthetic oligonucleotide"
ugcaaugguuuucaggaagaaac

SEQ ID NO: 1975 - DNA, 23 bp, Artificial Sequence
  source: /note="Description of Artificial Sequence: Synthetic oligonucleotide"
  source: /note="Description of Combined DNA/RNA Molecule: Synthetic oligonucleotide"
uagcaatgguuuucaggaagaaa

SEQ ID NO: 1976 - RNA, 23 nt, Artificial Sequence
  source: /note="Description of Artificial Sequence: Synthetic oligonucleotide"
uagagcaaugguuuucaggaaga

SEQ ID NO: 1977 - RNA, 23 nt, Artificial Sequence
  source: /note="Description of Artificial Sequence: Synthetic oligonucleotide"
uaugcaagagcaaugguuuucag

SEQ ID NO: 1978 - RNA, 23 nt, Artificial Sequence
  source: /note="Description of Artificial Sequence: Synthetic oligonucleotide"
ucaugcaagagcaaugguuuuca

SEQ ID NO: 1979 - RNA, 23 nt, Artificial Sequence
  source: /note="Description of Artificial Sequence: Synthetic oligonucleotide"
uaacaugcaagagcaaugguuuu

SEQ ID NO: 1980 - DNA, 23 bp, Artificial Sequence
  source: /note="Description of Artificial Sequence: Synthetic oligonucleotide"
  source: /note="Description of Combined DNA/RNA Molecule: Synthetic oligonucleotide"
uuaacatgcaagagcaaugguuu

SEQ ID NO: 1981 - RNA, 23 nt, Artificial Sequence
  source: /note="Description of Artificial Sequence: Synthetic oligonucleotide"
uguaacaugcaagagcaaugguu

SEQ ID NO: 1982 - RNA, 23 nt, Artificial Sequence
  source: /note="Description of Artificial Sequence: Synthetic oligonucleotide"
uuguaacaugcaagagcaauggu

SEQ ID NO: 1983 - RNA, 23 nt, Artificial Sequence
  source: /note="Description of Artificial Sequence: Synthetic oligonucleotide"
uauguaacaugcaagagcaaugg

SEQ ID NO: 1984 - RNA, 23 nt, Artificial Sequence
  source: /note="Description of Artificial Sequence: Synthetic oligonucleotide"
ucauguaacaugcaagagcaaug

SEQ ID NO: 1985 - DNA, 23 bp, Artificial Sequence
  source: /note="Description of Artificial Sequence: Synthetic oligonucleotide"
  source: /note="Description of Combined DNA/RNA Molecule: Synthetic oligonucleotide"
uccaugtaacaugcaagagcaau

SEQ ID NO: 1986 - RNA, 23 nt, Artificial Sequence
  source: /note="Description of Artificial Sequence: Synthetic oligonucleotide"
uaccauguaacaugcaagagcaa

SEQ ID NO: 1987 - DNA, 23 bp, Artificial Sequence
  source: /note="Description of Artificial Sequence: Synthetic oligonucleotide"
  source: /note="Description of Combined DNA/RNA Molecule: Synthetic oligonucleotide"
uaaccatguaacaugcaagagca

SEQ ID NO: 1988 - RNA, 23 nt, Artificial Sequence
  source: /note="Description of Artificial Sequence: Synthetic oligonucleotide"
uuaaccauguaacaugcaagagc

SEQ ID NO: 1989 - RNA, 23 nt, Artificial Sequence
  source: /note="Description of Artificial Sequence: Synthetic oligonucleotide"
uguaaccauguaacaugcaagag

SEQ ID NO: 1990 - RNA, 23 nt, Artificial Sequence
  source: /note="Description of Artificial Sequence: Synthetic oligonucleotide"
ugguaaccauguaacaugcaaga

SEQ ID NO: 1991 - RNA, 23 nt, Artificial Sequence
  source: /note="Description of Artificial Sequence: Synthetic oligonucleotide"
uugguaaccauguaacaugcaag

SEQ ID NO: 1992 - RNA, 23 nt, Artificial Sequence
  source: /note="Description of Artificial Sequence: Synthetic oligonucleotide"
ugugguaaccauguaacaugcaa

SEQ ID NO: 1993 - RNA, 23 nt, Artificial Sequence
  source: /note="Description of Artificial Sequence: Synthetic oligonucleotide"
uccuuuagaaguuaugcuuuuua

SEQ ID NO: 1994 - DNA, 23 bp, Artificial Sequence
  source: /note="Description of Artificial Sequence: Synthetic oligonucleotide"
  source: /note="Description of Combined DNA/RNA Molecule: Synthetic oligonucleotide"
uuccuutagaaguuaugcuuuuu

SEQ ID NO: 1995 - DNA, 23 bp, Artificial Sequence
  source: /note="Description of Artificial Sequence: Synthetic oligonucleotide"
  source: /note="Description of Combined DNA/RNA Molecule: Synthetic oligonucleotide"
uuuccutuagaaguuaugcuuuu

SEQ ID NO: 1996 - DNA, 23 bp, Artificial Sequence
  source: /note="Description of Artificial Sequence: Synthetic oligonucleotide"
  source: /note="Description of Combined DNA/RNA Molecule: Synthetic oligonucleotide"
ucuucctuuagaaguuaugcuuu

SEQ ID NO: 1997 - RNA, 23 nt, Artificial Sequence
  source: /note="Description of Artificial Sequence: Synthetic oligonucleotide"
ucuauucugcuuccuuuagaagu

SEQ ID NO: 1998 - DNA, 23 bp, Artificial Sequence
  source: /note="Description of Artificial Sequence: Synthetic oligonucleotide"
  source: /note="Description of Combined DNA/RNA Molecule: Synthetic oligonucleotide"
ugcuautcugcuuccuuuagaag

SEQ ID NO: 1999 - DNA, 23 bp, Artificial Sequence
  source: /note="Description of Artificial Sequence: Synthetic oligonucleotide"
  source: /note="Description of Combined DNA/RNA Molecule: Synthetic oligonucleotide"
uagcuatucugcuuccuuuagaa

SEQ ID NO: 2000 - RNA, 23 nt, Artificial Sequence
  source: /note="Description of Artificial Sequence: Synthetic oligonucleotide"
uguaguaaaugcaucuuacuuau

SEQ ID NO: 2001 - RNA, 23 nt, Artificial Sequence
  source: /note="Description of Artificial Sequence: Synthetic oligonucleotide"
ucugaagcauuagaagccaacug

SEQ ID NO: 2002 - DNA, 23 bp, Artificial Sequence
  source: /note="Description of Artificial Sequence: Synthetic oligonucleotide"
  source: /note="Description of Combined DNA/RNA Molecule: Synthetic oligonucleotide"
ucuauctgaagcauuagaagcca

SEQ ID NO: 2003 - DNA, 23 bp, Artificial Sequence
  source: /note="Description of Artificial Sequence: Synthetic oligonucleotide"
  source: /note="Description of Combined DNA/RNA Molecule: Synthetic oligonucleotide"
uuucuatcugaagcauuagaagc

SEQ ID NO: 2004 - RNA, 23 nt, Artificial Sequence
  source: /note="Description of Artificial Sequence: Synthetic oligonucleotide"
uauucuaucugaagcauuagaag

SEQ ID NO: 2005 - DNA, 23 bp, Artificial Sequence
  source: /note="Description of Artificial Sequence: Synthetic oligonucleotide"
  source: /note="Description of Combined DNA/RNA Molecule: Synthetic oligonucleotide"
ucuguatucuaucugaagcauua

SEQ ID NO: 2006 - RNA, 23 nt, Artificial Sequence
  source: /note="Description of Artificial Sequence: Synthetic oligonucleotide"
uacuguauucuaucugaagcauu

SEQ ID NO: 2007 - RNA, 23 nt, Artificial Sequence
  source: /note="Description of Artificial Sequence: Synthetic oligonucleotide"
ucaacuguauucuaucugaagca

SEQ ID NO: 2008 - DNA, 23 bp, Artificial Sequence
  source: /note="Description of Artificial Sequence: Synthetic oligonucleotide"
  source: /note="Description of Combined DNA/RNA Molecule: Synthetic oligonucleotide"
uccaactguauucuaucugaagc

SEQ ID NO: 2009 - RNA, 21 nt, Artificial Sequence
  source: /note="Description of Artificial Sequence: Synthetic oligonucleotide"
cgagacaagucaguucuggaa

SEQ ID NO: 2010 - RNA, 21 nt, Artificial Sequence
  source: /note="Description of Artificial Sequence: Synthetic oligonucleotide"
ggcuccagagaaguuucuaca

SEQ ID NO: 2011 - RNA, 21 nt, Artificial Sequence
  source: /note="Description of Artificial Sequence: Synthetic oligonucleotide"
cguggaauuuggacacuuuga

SEQ ID NO: 2012 - RNA, 21 nt, Artificial Sequence
  source: /note="Description of Artificial Sequence: Synthetic oligonucleotide"
guggaauuuggacacuuugga

SEQ ID NO: 2013 - RNA, 21 nt, Artificial Sequence
  source: /note="Description of Artificial Sequence: Synthetic oligonucleotide"
uuccaggaacugaaguccgaa

SEQ ID NO: 2014 - RNA, 21 nt, Artificial Sequence
  source: /note="Description of Artificial Sequence: Synthetic oligonucleotide"
cugaaguccgagcuaacugaa

SEQ ID NO: 2015 - RNA, 21 nt, Artificial Sequence
  source: /note="Description of Artificial Sequence: Synthetic oligonucleotide"
aaguccgagcuaacugaagua

SEQ ID NO: 2016 - RNA, 21 nt, Artificial Sequence
  source: /note="Description of Artificial Sequence: Synthetic oligonucleotide"
aguccgagcuaacugaaguua

SEQ ID NO: 2017 - RNA, 21 nt, Artificial Sequence
  source: /note="Description of Artificial Sequence: Synthetic oligonucleotide"
guccgagcuaacugaaguuca

SEQ ID NO: 2018 - RNA, 21 nt, Artificial Sequence
  source: /note="Description of Artificial Sequence: Synthetic oligonucleotide"
uccgagcuaacugaaguucca

SEQ ID NO: 2019 - RNA, 21 nt, Artificial Sequence
  source: /note="Description of Artificial Sequence: Synthetic oligonucleotide"
ccgagcuaacugaaguuccua

SEQ ID NO: 2020 - RNA, 21 nt, Artificial Sequence
  source: /note="Description of Artificial Sequence: Synthetic oligonucleotide"
cgagcuaacugaaguuccuga

SEQ ID NO: 2021 - RNA, 21 nt, Artificial Sequence
  source: /note="Description of Artificial Sequence: Synthetic oligonucleotide"
aaguuccugcuucccgaauua

SEQ ID NO: 2022 - RNA, 21 nt, Artificial Sequence
  source: /note="Description of Artificial Sequence: Synthetic oligonucleotide"
aguuccugcuucccgaauuua

SEQ ID NO: 2023 - RNA, 21 nt, Artificial Sequence
  source: /note="Description of Artificial Sequence: Synthetic oligonucleotide"
guuccugcuucccgaauuuua

SEQ ID NO: 2024 - RNA, 21 nt, Artificial Sequence
  source: /note="Description of Artificial Sequence: Synthetic oligonucleotide"
uuccugcuucccgaauuuuga

SEQ ID NO: 2025 - RNA, 21 nt, Artificial Sequence
  source: /note="Description of Artificial Sequence: Synthetic oligonucleotide"
uccugcuucccgaauuuugaa

SEQ ID NO: 2026 - RNA, 21 nt, Artificial Sequence
  source: /note="Description of Artificial Sequence: Synthetic oligonucleotide"
ccugcuucccgaauuuugaaa

SEQ ID NO: 2027 - RNA, 21 nt, Artificial Sequence
  source: /note="Description of Artificial Sequence: Synthetic oligonucleotide"
cugcuucccgaauuuugaaga

SEQ ID NO: 2028 - RNA, 21 nt, Artificial Sequence
  source: /note="Description of Artificial Sequence: Synthetic oligonucleotide"
cuucccgaauuuugaaggaga

SEQ ID NO: 2029 - RNA, 21 nt, Artificial Sequence
  source: /note="Description of Artificial Sequence: Synthetic oligonucleotide"
cggauguggagaacuaguuua

SEQ ID NO: 2030 - RNA, 21 nt, Artificial Sequence
  source: /note="Description of Artificial Sequence: Synthetic oligonucleotide"
ggauguggagaacuaguuuga

SEQ ID NO: 2031 - RNA, 21 nt, Artificial Sequence
  source: /note="Description of Artificial Sequence: Synthetic oligonucleotide"
uguggagaacuaguuugggua

SEQ ID NO: 2032 - RNA, 21 nt, Artificial Sequence
  source: /note="Description of Artificial Sequence: Synthetic oligonucleotide"
aacagcagaaacaauuacuga

SEQ ID NO: 2033 - RNA, 21 nt, Artificial Sequence
  source: /note="Description of Artificial Sequence: Synthetic oligonucleotide"
acagcagaaacaauuacugga

SEQ ID NO: 2034 - RNA, 21 nt, Artificial Sequence
  source: /note="Description of Artificial Sequence: Synthetic oligonucleotide"
cagcagaaacaauuacuggca

SEQ ID NO: 2035 - RNA, 21 nt, Artificial Sequence
  source: /note="Description of Artificial Sequence: Synthetic oligonucleotide"
cagaaacaauuacuggcaaga

SEQ ID NO: 2036 - RNA, 21 nt, Artificial Sequence
  source: /note="Description of Artificial Sequence: Synthetic oligonucleotide"
aaacaauuacuggcaaguaua

SEQ ID NO: 2037 - RNA, 21 nt, Artificial Sequence
  source: /note="Description of Artificial Sequence: Synthetic oligonucleotide"
aacaauuacuggcaaguauga

SEQ ID NO: 2038 - RNA, 21 nt, Artificial Sequence
  source: /note="Description of Artificial Sequence: Synthetic oligonucleotide"
uacuggcaaguauggugugua

SEQ ID NO: 2039 - RNA, 21 nt, Artificial Sequence
  source: /note="Description of Artificial Sequence: Synthetic oligonucleotide"
uccgccagguuuuugaguaua

SEQ ID NO: 2040 - RNA, 21 nt, Artificial Sequence
  source: /note="Description of Artificial Sequence: Synthetic oligonucleotide"
cgccagguuuuugaguaugaa

SEQ ID NO: 2041 - RNA, 21 nt, Artificial Sequence
  source: /note="Description of Artificial Sequence: Synthetic oligonucleotide"
uuugaguaugaccucaucaga

SEQ ID NO: 2042 - RNA, 21 nt, Artificial Sequence
  source: /note="Description of Artificial Sequence: Synthetic oligonucleotide"
gaccucaucagccaguuuaua

SEQ ID NO: 2043 - RNA, 21 nt, Artificial Sequence
  source: /note="Description of Artificial Sequence: Synthetic oligonucleotide"
accucaucagccaguuuauga

SEQ ID NO: 2044 - RNA, 21 nt, Artificial Sequence
  source: /note="Description of Artificial Sequence: Synthetic oligonucleotide"
gcuacccuucuaagguucaca

SEQ ID NO: 2045 - RNA, 21 nt, Artificial Sequence
  source: /note="Description of Artificial Sequence: Synthetic oligonucleotide"
cuucuaagguucacauacuga

SEQ ID NO: 2046 - RNA, 21 nt, Artificial Sequence
  source: /note="Description of Artificial Sequence: Synthetic oligonucleotide"
uucuaagguucacauacugca

SEQ ID NO: 2047 - RNA, 21 nt, Artificial Sequence
  source: /note="Description of Artificial Sequence: Synthetic oligonucleotide"
ucuaagguucacauacugcca

SEQ ID NO: 2048 - RNA, 21 nt, Artificial Sequence
  source: /note="Description of Artificial Sequence: Synthetic oligonucleotide"
gaguccagaacugucauaaga

SEQ ID NO: 2049 - RNA, 21 nt, Artificial Sequence
  source: /note="Description of Artificial Sequence: Synthetic oligonucleotide"
aguccagaacugucauaagaa

SEQ ID NO: 2050 - RNA, 21 nt, Artificial Sequence
  source: /note="Description of Artificial Sequence: Synthetic oligonucleotide"
guccagaacugucauaagaua

SEQ ID NO: 2051 - RNA, 21 nt, Artificial Sequence
  source: /note="Description of Artificial Sequence: Synthetic oligonucleotide"
cagaacugucauaagauauga

SEQ ID NO: 2052 - RNA, 21 nt, Artificial Sequence
  source: /note="Description of Artificial Sequence: Synthetic oligonucleotide"
agaacugucauaagauaugaa

SEQ ID NO: 2053 - RNA, 21 nt, Artificial Sequence
  source: /note="Description of Artificial Sequence: Synthetic oligonucleotide"
gaacugucauaagauaugaga

SEQ ID NO: 2054 - RNA, 21 nt, Artificial Sequence
  source: /note="Description of Artificial Sequence: Synthetic oligonucleotide"
aacugucauaagauaugagca

SEQ ID NO: 2055 - RNA, 21 nt, Artificial Sequence
  source: /note="Description of Artificial Sequence: Synthetic oligonucleotide"
cugucauaagauaugagcuga

SEQ ID NO: 2056 - RNA, 21 nt, Artificial Sequence
  source: /note="Description of Artificial Sequence: Synthetic oligonucleotide"
uaagauaugagcugaauacca

SEQ ID NO: 2057 - RNA, 21 nt, Artificial Sequence
  source: /note="Description of Artificial Sequence: Synthetic oligonucleotide"
agauaugagcugaauaccgaa

SEQ ID NO: 2058 - RNA, 21 nt, Artificial Sequence
  source: /note="Description of Artificial Sequence: Synthetic oligonucleotide"
auaugagcugaauaccgagaa

SEQ ID NO: 2059 - RNA, 21 nt, Artificial Sequence
  source: /note="Description of Artificial Sequence: Synthetic oligonucleotide"
cacggacaguucccguauuca

SEQ ID NO: 2060 - RNA, 21 nt, Artificial Sequence
  source: /note="Description of Artificial Sequence: Synthetic oligonucleotide"
acggacaguucccguauucua

SEQ ID NO: 2061 - RNA, 21 nt, Artificial Sequence
  source: /note="Description of Artificial Sequence: Synthetic oligonucleotide"
ggacaguucccguauucuuga

SEQ ID NO: 2062 - RNA, 21 nt, Artificial Sequence
  source: /note="Description of Artificial Sequence: Synthetic oligonucleotide"
uaccgucaacuuugcuuauga

SEQ ID NO: 2063 - RNA, 21 nt, Artificial Sequence
  source: /note="Description of Artificial Sequence: Synthetic oligonucleotide"
accgucaacuuugcuuaugaa

SEQ ID NO: 2064 - RNA, 21 nt, Artificial Sequence
  source: /note="Description of Artificial Sequence: Synthetic oligonucleotide"
ccgucaacuuugcuuaugaca

SEQ ID NO: 2065 - RNA, 21 nt, Artificial Sequence
  source: /note="Description of Artificial Sequence: Synthetic oligonucleotide"
cgucaacuuugcuuaugacaa

SEQ ID NO: 2066 - RNA, 21 nt, Artificial Sequence
  source: /note="Description of Artificial Sequence: Synthetic oligonucleotide"
auaaguacagcagcaugauua

SEQ ID NO: 2067 - RNA, 21 nt, Artificial Sequence
  source: /note="Description of Artificial Sequence: Synthetic oligonucleotide"
uaaguacagcagcaugauuga

SEQ ID NO: 2068 - RNA, 21 nt, Artificial Sequence
  source: /note="Description of Artificial Sequence: Synthetic oligonucleotide"
guacagcagcaugauugacua

SEQ ID NO: 2069 - RNA, 21 nt, Artificial Sequence
  source: /note="Description of Artificial Sequence: Synthetic oligonucleotide"
uuugccugggacaacuugaaa

SEQ ID NO: 2070 - RNA, 21 nt, Artificial Sequence
  source: /note="Description of Artificial Sequence: Synthetic oligonucleotide"
cuugaacauggucacuuauga

SEQ ID NO: 2071 - RNA, 21 nt, Artificial Sequence
  source: /note="Description of Artificial Sequence: Synthetic oligonucleotide"
uugaacauggucacuuaugaa

SEQ ID NO: 2072 - RNA, 21 nt, Artificial Sequence
  source: /note="Description of Artificial Sequence: Synthetic oligonucleotide"
ugaacauggucacuuaugaca

SEQ ID NO: 2073 - RNA, 21 nt, Artificial Sequence
  source: /note="Description of Artificial Sequence: Synthetic oligonucleotide"
gaacauggucacuuaugacaa

SEQ ID NO: 2074 - RNA, 21 nt, Artificial Sequence
  source: /note="Description of Artificial Sequence: Synthetic oligonucleotide"
uggucacuuaugacaucaaga

SEQ ID NO: 2075 - RNA, 21 nt, Artificial Sequence
  source: /note="Description of Artificial Sequence: Synthetic oligonucleotide"
ggucacuuaugacaucaagca

SEQ ID NO: 2076 - RNA, 21 nt, Artificial Sequence
  source: /note="Description of Artificial Sequence: Synthetic oligonucleotide"
gucacuuaugacaucaagcua

SEQ ID NO: 2077 - RNA, 21 nt, Artificial Sequence
  source: /note="Description of Artificial Sequence: Synthetic oligonucleotide"
ucacuuaugacaucaagcuca

SEQ ID NO: 2078 - RNA, 21 nt, Artificial Sequence
  source: /note="Description of Artificial Sequence: Synthetic oligonucleotide"
caucaagcucuccaagaugua

SEQ ID NO: 2079 - RNA, 21 nt, Artificial Sequence
  source: /note="Description of Artificial Sequence: Synthetic oligonucleotide"
gcucuccaagaugugaaaaga

SEQ ID NO: 2080 - RNA, 21 nt, Artificial Sequence
  source: /note="Description of Artificial Sequence: Synthetic oligonucleotide"
ucuccaagaugugaaaagcca

SEQ ID NO: 2081 - RNA, 21 nt, Artificial Sequence
  source: /note="Description of Artificial Sequence: Synthetic oligonucleotide"
uucaggaauuguagucugaga

SEQ ID NO: 2082 - RNA, 21 nt, Artificial Sequence
  source: /note="Description of Artificial Sequence: Synthetic oligonucleotide"
uaucuucugucagcauuuaua

SEQ ID NO: 2083 - RNA, 21 nt, Artificial Sequence
  source: /note="Description of Artificial Sequence: Synthetic oligonucleotide"
aucuucugucagcauuuauga

SEQ ID NO: 2084 - RNA, 21 nt, Artificial Sequence
  source: /note="Description of Artificial Sequence: Synthetic oligonucleotide"
ucuucugucagcauuuaugga

SEQ ID NO: 2085 - RNA, 21 nt, Artificial Sequence
  source: /note="Description of Artificial Sequence: Synthetic oligonucleotide"
cuucugucagcauuuauggga

SEQ ID NO: 2086 - RNA, 21 nt, Artificial Sequence
  source: /note="Description of Artificial Sequence: Synthetic oligonucleotide"
ucugucagcauuuaugggaua

SEQ ID NO: 2087 - RNA, 21 nt, Artificial Sequence
  source: /note="Description of Artificial Sequence: Synthetic oligonucleotide"
cugucagcauuuaugggauga

SEQ ID NO: 2088 - RNA, 21 nt, Artificial Sequence
  source: /note="Description of Artificial Sequence: Synthetic oligonucleotide"
ucagcauuuaugggauguuua

SEQ ID NO: 2089 - RNA, 21 nt, Artificial Sequence
  source: /note="Description of Artificial Sequence: Synthetic oligonucleotide"
cagcauuuaugggauguuuaa

SEQ ID NO: 2090 - RNA, 21 nt, Artificial Sequence
  source: /note="Description of Artificial Sequence: Synthetic oligonucleotide"
agcauuuaugggauguuuaaa

SEQ ID NO: 2091 - RNA, 21 nt, Artificial Sequence
  source: /note="Description of Artificial Sequence: Synthetic oligonucleotide"
cauuuaugggauguuuaauga

SEQ ID NO: 2092 - RNA, 21 nt, Artificial Sequence
  source: /note="Description of Artificial Sequence: Synthetic oligonucleotide"
auuuaugggauguuuaaugaa

SEQ ID NO: 2093 - RNA, 21 nt, Artificial Sequence
  source: /note="Description of Artificial Sequence: Synthetic oligonucleotide"
ggauguuuaaugacauaguua

SEQ ID NO: 2094 - RNA, 21 nt, Artificial Sequence
  source: /note="Description of Artificial Sequence: Synthetic oligonucleotide"
gauguuuaaugacauaguuca

SEQ ID NO: 2095 - RNA, 21 nt, Artificial Sequence
  source: /note="Description of Artificial Sequence: Synthetic oligonucleotide"
auguuuaaugacauaguucaa

SEQ ID NO: 2096 - RNA, 21 nt, Artificial Sequence
  source: /note="Description of Artificial Sequence: Synthetic oligonucleotide"
guuuaaugacauaguucaaga

SEQ ID NO: 2097 - RNA, 21 nt, Artificial Sequence
  source: /note="Description of Artificial Sequence: Synthetic oligonucleotide"
uuuaaugacauaguucaagua

SEQ ID NO: 2098 - RNA, 21 nt, Artificial Sequence
  source: /note="Description of Artificial Sequence: Synthetic oligonucleotide"
ugacauaguucaaguuuucua

SEQ ID NO: 2099 - RNA, 21 nt, Artificial Sequence
  source: /note="Description of Artificial Sequence: Synthetic oligonucleotide"
gacauaguucaaguuuucuua

SEQ ID NO: 2100 - RNA, 21 nt, Artificial Sequence
  source: /note="Description of Artificial Sequence: Synthetic oligonucleotide"
acauaguucaaguuuucuuga

SEQ ID NO: 2101 - RNA, 21 nt, Artificial Sequence
  source: /note="Description of Artificial Sequence: Synthetic oligonucleotide"
cauaguucaaguuuucuugua

SEQ ID NO: 2102 - RNA, 21 nt, Artificial Sequence
  source: /note="Description of Artificial Sequence: Synthetic oligonucleotide"
auaguucaaguuuucuuguga

SEQ ID NO: 2103 - RNA, 21 nt, Artificial Sequence
  source: /note="Description of Artificial Sequence: Synthetic oligonucleotide"
uaguucaaguuuucuugugaa

SEQ ID NO: 2104 - RNA, 21 nt, Artificial Sequence
  source: /note="Description of Artificial Sequence: Synthetic oligonucleotide"
aguucaaguuuucuugugaua

SEQ ID NO: 2105 - RNA, 21 nt, Artificial Sequence
  source: /note="Description of Artificial Sequence: Synthetic oligonucleotide"
guucaaguuuucuugugauua

SEQ ID NO: 2106 - RNA, 21 nt, Artificial Sequence
  source: /note="Description of Artificial Sequence: Synthetic oligonucleotide"
ucaaguuuucuugugauuuga

SEQ ID NO: 2107 - RNA, 21 nt, Artificial Sequence
  source: /note="Description of Artificial Sequence: Synthetic oligonucleotide"
auaguuucuuccugaaaacca

SEQ ID NO: 2108 - RNA, 21 nt, Artificial Sequence
  source: /note="Description of Artificial Sequence: Synthetic oligonucleotide"
uucuuccugaaaaccauugca

SEQ ID NO: 2109 - RNA, 21 nt, Artificial Sequence
  source: /note="Description of Artificial Sequence: Synthetic oligonucleotide"
ucuuccugaaaaccauugcua

SEQ ID NO: 2110 - RNA, 21 nt, Artificial Sequence
  source: /note="Description of Artificial Sequence: Synthetic oligonucleotide"
uuccugaaaaccauugcucua

SEQ ID NO: 2111 - RNA, 21 nt, Artificial Sequence
  source: /note="Description of Artificial Sequence: Synthetic oligonucleotide"
gaaaaccauugcucuugcaua

SEQ ID NO: 2112 - RNA, 21 nt, Artificial Sequence
  source: /note="Description of Artificial Sequence: Synthetic oligonucleotide"
aaaaccauugcucuugcauga

SEQ ID NO: 2113 - RNA, 21 nt, Artificial Sequence
  source: /note="Description of Artificial Sequence: Synthetic oligonucleotide"
aaccauugcucuugcauguua

SEQ ID NO: 2114 - RNA, 21 nt, Artificial Sequence
  source: /note="Description of Artificial Sequence: Synthetic oligonucleotide"
accauugcucuugcauguuaa

SEQ ID NO: 2115 - RNA, 21 nt, Artificial Sequence
  source: /note="Description of Artificial Sequence: Synthetic oligonucleotide"
ccauugcucuugcauguuaca

SEQ ID NO: 2116 - RNA, 21 nt, Artificial Sequence
  source: /note="Description of Artificial Sequence: Synthetic oligonucleotide"
cauugcucuugcauguuacaa

SEQ ID NO: 2117 - RNA, 21 nt, Artificial Sequence
  source: /note="Description of Artificial Sequence: Synthetic oligonucleotide"
auugcucuugcauguuacaua

SEQ ID NO: 2118 - RNA, 21 nt, Artificial Sequence
  source: /note="Description of Artificial Sequence: Synthetic oligonucleotide"
uugcucuugcauguuacauga

SEQ ID NO: 2119 - RNA, 21 nt, Artificial Sequence
  source: /note="Description of Artificial Sequence: Synthetic oligonucleotide"
ugcucuugcauguuacaugga

SEQ ID NO: 2120 - RNA, 21 nt, Artificial Sequence
  source: /note="Description of Artificial Sequence: Synthetic oligonucleotide"
gcucuugcauguuacauggua

SEQ ID NO: 2121 - RNA, 21 nt, Artificial Sequence
  source: /note="Description of Artificial Sequence: Synthetic oligonucleotide"
cucuugcauguuacaugguua

SEQ ID NO: 2122 - RNA, 21 nt, Artificial Sequence
  source: /note="Description of Artificial Sequence: Synthetic oligonucleotide"
ucuugcauguuacaugguuaa

SEQ ID NO: 2123 - RNA, 21 nt, Artificial Sequence
  source: /note="Description of Artificial Sequence: Synthetic oligonucleotide"
cuugcauguuacaugguuaca

SEQ ID NO: 2124 - RNA, 21 nt, Artificial Sequence
  source: /note="Description of Artificial Sequence: Synthetic oligonucleotide"
uugcauguuacaugguuacca

SEQ ID NO: 2125 - RNA, 21 nt, Artificial Sequence
  source: /note="Description of Artificial Sequence: Synthetic oligonucleotide"
ugcauguuacaugguuaccaa

SEQ ID NO: 2126 - RNA, 21 nt, Artificial Sequence
  source: /note="Description of Artificial Sequence: Synthetic oligonucleotide"
gcauguuacaugguuaccaca

SEQ ID NO: 2127 - RNA, 21 nt, Artificial Sequence
  source: /note="Description of Artificial Sequence: Synthetic oligonucleotide"
aaaagcauaacuucuaaagga

SEQ ID NO: 2128 - RNA, 21 nt, Artificial Sequence
  source: /note="Description of Artificial Sequence: Synthetic oligonucleotide"
aaagcauaacuucuaaaggaa

SEQ ID NO: 2129 - RNA, 21 nt, Artificial Sequence
  source: /note="Description of Artificial Sequence: Synthetic oligonucleotide"
aagcauaacuucuaaaggaaa

SEQ ID NO: 2130 - RNA, 21 nt, Artificial Sequence
  source: /note="Description of Artificial Sequence: Synthetic oligonucleotide"
agcauaacuucuaaaggaaga

SEQ ID NO: 2131 - RNA, 21 nt, Artificial Sequence
  source: /note="Description of Artificial Sequence: Synthetic oligonucleotide"
uucuaaaggaagcagaauaga

SEQ ID NO: 2132 - RNA, 21 nt, Artificial Sequence
  source: /note="Description of Artificial Sequence: Synthetic oligonucleotide"
ucuaaaggaagcagaauagca

SEQ ID NO: 2133 - RNA, 21 nt, Artificial Sequence
  source: /note="Description of Artificial Sequence: Synthetic oligonucleotide"
cuaaaggaagcagaauagcua

SEQ ID NO: 2134 - RNA, 21 nt, Artificial Sequence
  source: /note="Description of Artificial Sequence: Synthetic oligonucleotide"
aaguaagaugcauuuacuaca

SEQ ID NO: 2135 - RNA, 21 nt, Artificial Sequence
  source: /note="Description of Artificial Sequence: Synthetic oligonucleotide"
guuggcuucuaaugcuucaga

SEQ ID NO: 2136 - RNA, 21 nt, Artificial Sequence
  source: /note="Description of Artificial Sequence: Synthetic oligonucleotide"
gcuucuaaugcuucagauaga

SEQ ID NO: 2137 - RNA, 21 nt, Artificial Sequence
  source: /note="Description of Artificial Sequence: Synthetic oligonucleotide"
uucuaaugcuucagauagaaa

SEQ ID NO: 2138 - RNA, 21 nt, Artificial Sequence
  source: /note="Description of Artificial Sequence: Synthetic oligonucleotide"
ucuaaugcuucagauagaaua

SEQ ID NO: 2139 - RNA, 21 nt, Artificial Sequence
  source: /note="Description of Artificial Sequence: Synthetic oligonucleotide"
augcuucagauagaauacaga

SEQ ID NO: 2140 - RNA, 21 nt, Artificial Sequence
  source: /note="Description of Artificial Sequence: Synthetic oligonucleotide"
ugcuucagauagaauacagua

SEQ ID NO: 2141 - RNA, 21 nt, Artificial Sequence
  source: /note="Description of Artificial Sequence: Synthetic oligonucleotide"
cuucagauagaauacaguuga

SEQ ID NO: 2142 - RNA, 21 nt, Artificial Sequence
  source: /note="Description of Artificial Sequence: Synthetic oligonucleotide"
uucagauagaauacaguugga

SEQ ID NO: 2143 - RNA, 23 nt, Artificial Sequence
  source: /note="Description of Artificial Sequence: Synthetic oligonucleotide"
uuccagaacugacuugucucgga

SEQ ID NO: 2144 - RNA, 23 nt, Artificial Sequence
  source: /note="Description of Artificial Sequence: Synthetic oligonucleotide"
uguagaaacuucucuggagccug

SEQ ID NO: 2145 - DNA, 23 bp, Artificial Sequence
  source: /note="Description of Artificial Sequence: Synthetic oligonucleotide"
  source: /note="Description of Combined DNA/RNA Molecule: Synthetic oligonucleotide"
ucaaagtguccaaauuccacgua

SEQ ID NO: 2146 - RNA, 23 nt, Artificial Sequence
  source: /note="Description of Artificial Sequence: Synthetic oligonucleotide"
uccaaaguguccaaauuccacgu

SEQ ID NO: 2147 - RNA, 23 nt, Artificial Sequence
  source: /note="Description of Artificial Sequence: Synthetic oligonucleotide"
uucggacuucaguuccuggaagg

SEQ ID NO: 2148 - DNA, 23 bp, Artificial Sequence
  source: /note="Description of Artificial Sequence: Synthetic oligonucleotide"
  source: /note="Description of Combined DNA/RNA Molecule: Synthetic oligonucleotide"
uucagutagcucggacuucaguu

SEQ ID NO: 2149 - RNA, 23 nt, Artificial Sequence
  source: /note="Description of Artificial Sequence: Synthetic oligonucleotide"
uacuucaguuagcucggacuuca

SEQ ID NO: 2150 - RNA, 23 nt, Artificial Sequence
  source: /note="Description of Artificial Sequence: Synthetic oligonucleotide"
uaacuucaguuagcucggacuuc

SEQ ID NO: 2151 - DNA, 23 bp, Artificial Sequence
  source: /note="Description of Artificial Sequence: Synthetic oligonucleotide"
  source: /note="Description of Combined DNA/RNA Molecule: Synthetic oligonucleotide"
ugaacutcaguuagcucggacuu

SEQ ID NO: 2152 - DNA, 23 bp, Artificial Sequence
  source: /note="Description of Artificial Sequence: Synthetic oligonucleotide"
  source: /note="Description of Combined DNA/RNA Molecule: Synthetic oligonucleotide"
uggaactucaguuagcucggacu

SEQ ID NO: 2153 - RNA, 23 nt, Artificial Sequence
  source: /note="Description of Artificial Sequence: Synthetic oligonucleotide"
uaggaacuucaguuagcucggac

SEQ ID NO: 2154 - RNA, 23 nt, Artificial Sequence
  source: /note="Description of Artificial Sequence: Synthetic oligonucleotide"
ucaggaacuucaguuagcucgga

SEQ ID NO: 2155 - RNA, 23 nt, Artificial Sequence
  source: /note="Description of Artificial Sequence: Synthetic oligonucleotide"
uaauucgggaagcaggaacuuca

SEQ ID NO: 2156 - RNA, 23 nt, Artificial Sequence
  source: /note="Description of Artificial Sequence: Synthetic oligonucleotide"
uaaauucgggaagcaggaacuuc

SEQ ID NO: 2157 - DNA, 23 bp, Artificial Sequence
  source: /note="Description of Artificial Sequence: Synthetic oligonucleotide"
  source: /note="Description of Combined DNA/RNA Molecule: Synthetic oligonucleotide"
uaaaautcgggaagcaggaacuu

SEQ ID NO: 2158 - DNA, 23 bp, Artificial Sequence
  source: /note="Description of Artificial Sequence: Synthetic oligonucleotide"
  source: /note="Description of Combined DNA/RNA Molecule: Synthetic oligonucleotide"
ucaaaatucgggaagcaggaacu

SEQ ID NO: 2159 - RNA, 23 nt, Artificial Sequence
  source: /note="Description of Artificial Sequence: Synthetic oligonucleotide"
uucaaaauucgggaagcaggaac

SEQ ID NO: 2160 - RNA, 23 nt, Artificial Sequence
  source: /note="Description of Artificial Sequence: Synthetic oligonucleotide"
uuucaaaauucgggaagcaggaa

SEQ ID NO: 2161 - RNA, 23 nt, Artificial Sequence
  source: /note="Description of Artificial Sequence: Synthetic oligonucleotide"
ucuucaaaauucgggaagcagga

SEQ ID NO: 2162 - DNA, 23 bp, Artificial Sequence
  source: /note="Description of Artificial Sequence: Synthetic oligonucleotide"
  source: /note="Description of Combined DNA/RNA Molecule: Synthetic oligonucleotide"
ucuccutcaaaauucgggaagca

SEQ ID NO: 2163 - RNA, 23 nt, Artificial Sequence
  source: /note="Description of Artificial Sequence: Synthetic oligonucleotide"
uaaacuaguucuccacauccggu

SEQ ID NO: 2164 - DNA, 23 bp, Artificial Sequence
  source: /note="Description of Artificial Sequence: Synthetic oligonucleotide"
  source: /note="Description of Combined DNA/RNA Molecule: Synthetic oligonucleotide"
ucaaactaguucuccacauccgg

SEQ ID NO: 2165 - RNA, 23 nt, Artificial Sequence
  source: /note="Description of Artificial Sequence: Synthetic oligonucleotide"
uacccaaacuaguucuccacauc

SEQ ID NO: 2166 - RNA, 23 nt, Artificial Sequence
  source: /note="Description of Artificial Sequence: Synthetic oligonucleotide"
ucaguaauuguuucugcuguucu

SEQ ID NO: 2167 - RNA, 23 nt, Artificial Sequence
  source: /note="Description of Artificial Sequence: Synthetic oligonucleotide"
uccaguaauuguuucugcuguuc

SEQ ID NO: 2168 - DNA, 23 bp, Artificial Sequence
  source: /note="Description of Artificial Sequence: Synthetic oligonucleotide"
  source: /note="Description of Combined DNA/RNA Molecule: Synthetic oligonucleotide"
ugccagtaauuguuucugcuguu

SEQ ID NO: 2169 - RNA, 23 nt, Artificial Sequence
  source: /note="Description of Artificial Sequence: Synthetic oligonucleotide"
ucuugccaguaauuguuucugcu

SEQ ID NO: 2170 - DNA, 23 bp, Artificial Sequence
  source: /note="Description of Artificial Sequence: Synthetic oligonucleotide"
  source: /note="Description of Combined DNA/RNA Molecule: Synthetic oligonucleotide"
uauacutgccaguaauuguuucu

SEQ ID NO: 2171 - DNA, 23 bp, Artificial Sequence
  source: /note="Description of Artificial Sequence: Synthetic oligonucleotide"
  source: /note="Description of Combined DNA/RNA Molecule: Synthetic oligonucleotide"
ucauactugccaguaauuguuuc

SEQ ID NO: 2172 - RNA, 23 nt, Artificial Sequence
  source: /note="Description of Artificial Sequence: Synthetic oligonucleotide"
uacacaccauacuugccaguaau

SEQ ID NO: 2173 - RNA, 23 nt, Artificial Sequence
  source: /note="Description of Artificial Sequence: Synthetic oligonucleotide"
uauacucaaaaaccuggcggaca

SEQ ID NO: 2174 - RNA, 23 nt, Artificial Sequence
  source: /note="Description of Artificial Sequence: Synthetic oligonucleotide"
uucauacucaaaaaccuggcgga

SEQ ID NO: 2175 - RNA, 23 nt, Artificial Sequence
  source: /note="Description of Artificial Sequence: Synthetic oligonucleotide"
ucugaugaggucauacucaaaaa

SEQ ID NO: 2176 - RNA, 23 nt, Artificial Sequence
  source: /note="Description of Artificial Sequence: Synthetic oligonucleotide"
uauaaacuggcugaugaggucau

SEQ ID NO: 2177 - RNA, 23 nt, Artificial Sequence
  source: /note="Description of Artificial Sequence: Synthetic oligonucleotide"
ucauaaacuggcugaugagguca

SEQ ID NO: 2178 - RNA, 23 nt, Artificial Sequence
  source: /note="Description of Artificial Sequence: Synthetic oligonucleotide"
ugugaaccuuagaaggguagccc

SEQ ID NO: 2179 - DNA, 23 bp, Artificial Sequence
  source: /note="Description of Artificial Sequence: Synthetic oligonucleotide"
  source: /note="Description of Combined DNA/RNA Molecule: Synthetic oligonucleotide"
ucaguatgugaaccuuagaaggg

SEQ ID NO: 2180 - RNA, 23 nt, Artificial Sequence
  source: /note="Description of Artificial Sequence: Synthetic oligonucleotide"
ugcaguaugugaaccuuagaagg

SEQ ID NO: 2181 - DNA, 23 bp, Artificial Sequence
  source: /note="Description of Artificial Sequence: Synthetic oligonucleotide"
  source: /note="Description of Combined DNA/RNA Molecule: Synthetic oligonucleotide"
uggcagtaugugaaccuuagaag

SEQ ID NO: 2182 - RNA, 23 nt, Artificial Sequence
  source: /note="Description of Artificial Sequence: Synthetic oligonucleotide"
ucuuaugacaguucuggacucag

SEQ ID NO: 2183 - DNA, 23 bp, Artificial Sequence
  source: /note="Description of Artificial Sequence: Synthetic oligonucleotide"
  source: /note="Description of Combined DNA/RNA Molecule: Synthetic oligonucleotide"
uucuuatgacaguucuggacuca

SEQ ID NO: 2184 - RNA, 23 nt, Artificial Sequence
  source: /note="Description of Artificial Sequence: Synthetic oligonucleotide"
uaucuuaugacaguucuggacuc

SEQ ID NO: 2185 - RNA, 23 nt, Artificial Sequence
  source: /note="Description of Artificial Sequence: Synthetic oligonucleotide"
ucauaucuuaugacaguucugga

SEQ ID NO: 2186 - DNA, 23 bp, Artificial Sequence
  source: /note="Description of Artificial Sequence: Synthetic oligonucleotide"
  source: /note="Description of Combined DNA/RNA Molecule: Synthetic oligonucleotide"
uucauatcuuaugacaguucugg

SEQ ID NO: 2187 - RNA, 23 nt, Artificial Sequence
  source: /note="Description of Artificial Sequence: Synthetic oligonucleotide"
ucucauaucuuaugacaguucug

SEQ ID NO: 2188 - DNA, 23 bp, Artificial Sequence
  source: /note="Description of Artificial Sequence: Synthetic oligonucleotide"
  source: /note="Description of Combined DNA/RNA Molecule: Synthetic oligonucleotide"
ugcucataucuuaugacaguucu

SEQ ID NO: 2189 - RNA, 23 nt, Artificial Sequence
  source: /note="Description of Artificial Sequence: Synthetic oligonucleotide"
ucagcucauaucuuaugacaguu

SEQ ID NO: 2190 - DNA, 23 bp, Artificial Sequence
  source: /note="Description of Artificial Sequence: Synthetic oligonucleotide"
  source: /note="Description of Combined DNA/RNA Molecule: Synthetic oligonucleotide"
ugguautcagcucauaucuuaug

SEQ ID NO: 2191 - RNA, 23 nt, Artificial Sequence
  source: /note="Description of Artificial Sequence: Synthetic oligonucleotide"
uucgguauucagcucauaucuua

SEQ ID NO: 2192 - RNA, 23 nt, Artificial Sequence
  source: /note="Description of Artificial Sequence: Synthetic oligonucleotide"
uucucgguauucagcucauaucu

SEQ ID NO: 2193 - RNA, 23 nt, Artificial Sequence
  source: /note="Description of Artificial Sequence: Synthetic oligonucleotide"
ugaauacgggaacuguccguggu

SEQ ID NO: 2194 - RNA, 23 nt, Artificial Sequence
  source: /note="Description of Artificial Sequence: Synthetic oligonucleotide"
uagaauacgggaacuguccgugg

SEQ ID NO: 2195 - RNA, 23 nt, Artificial Sequence
  source: /note="Description of Artificial Sequence: Synthetic oligonucleotide"
ucaagaauacgggaacuguccgu

SEQ ID NO: 2196 - RNA, 23 nt, Artificial Sequence
  source: /note="Description of Artificial Sequence: Synthetic oligonucleotide"
ucauaagcaaaguugacgguagc

SEQ ID NO: 2197 - RNA, 23 nt, Artificial Sequence
  source: /note="Description of Artificial Sequence: Synthetic oligonucleotide"
uucauaagcaaaguugacgguag

SEQ ID NO: 2198 - RNA, 23 nt, Artificial Sequence
  source: /note="Description of Artificial Sequence: Synthetic oligonucleotide"
ugucauaagcaaaguugacggua

SEQ ID NO: 2199 - DNA, 23 bp, Artificial Sequence
  source: /note="Description of Artificial Sequence: Synthetic oligonucleotide"
  source: /note="Description of Combined DNA/RNA Molecule: Synthetic oligonucleotide"
uugucataagcaaaguugacggu

SEQ ID NO: 2200 - DNA, 23 bp, Artificial Sequence
  source: /note="Description of Artificial Sequence: Synthetic oligonucleotide"
  source: /note="Description of Combined DNA/RNA Molecule: Synthetic oligonucleotide"
uaaucatgcugcuguacuuauag

SEQ ID NO: 2201 - RNA, 23 nt, Artificial Sequence
  source: /note="Description of Artificial Sequence: Synthetic oligonucleotide"
ucaaucaugcugcuguacuuaua

SEQ ID NO: 2202 - RNA, 23 nt, Artificial Sequence
  source: /note="Description of Artificial Sequence: Synthetic oligonucleotide"
uagucaaucaugcugcuguacuu

SEQ ID NO: 2203 - RNA, 23 nt, Artificial Sequence
  source: /note="Description of Artificial Sequence: Synthetic oligonucleotide"
uuucaaguugucccaggcaaaga

SEQ ID NO: 2204 - RNA, 23 nt, Artificial Sequence
  source: /note="Description of Artificial Sequence: Synthetic oligonucleotide"
ucauaagugaccauguucaaguu

SEQ ID NO: 2205 - RNA, 23 nt, Artificial Sequence
  source: /note="Description of Artificial Sequence: Synthetic oligonucleotide"
uucauaagugaccauguucaagu

SEQ ID NO: 2206 - RNA, 23 nt, Artificial Sequence
  source: /note="Description of Artificial Sequence: Synthetic oligonucleotide"
ugucauaagugaccauguucaag

SEQ ID NO: 2207 - DNA, 23 bp, Artificial Sequence
  source: /note="Description of Artificial Sequence: Synthetic oligonucleotide"
  source: /note="Description of Combined DNA/RNA Molecule: Synthetic oligonucleotide"
uugucataagugaccauguucaa

SEQ ID NO: 2208 - DNA, 23 bp, Artificial Sequence
  source: /note="Description of Artificial Sequence: Synthetic oligonucleotide"
  source: /note="Description of Combined DNA/RNA Molecule: Synthetic oligonucleotide"
ucuugatgucauaagugaccaug

SEQ ID NO: 2209 - RNA, 23 nt, Artificial Sequence
  source: /note="Description of Artificial Sequence: Synthetic oligonucleotide"
ugcuugaugucauaagugaccau

SEQ ID NO: 2210 - RNA, 23 nt, Artificial Sequence
  source: /note="Description of Artificial Sequence: Synthetic oligonucleotide"
uagcuugaugucauaagugacca

SEQ ID NO: 2211 - DNA, 23 bp, Artificial Sequence
  source: /note="Description of Artificial Sequence: Synthetic oligonucleotide"
  source: /note="Description of Combined DNA/RNA Molecule: Synthetic oligonucleotide"
ugagcutgaugucauaagugacc

SEQ ID NO: 2212 - DNA, 23 bp, Artificial Sequence
  source: /note="Description of Artificial Sequence: Synthetic oligonucleotide"
  source: /note="Description of Combined DNA/RNA Molecule: Synthetic oligonucleotide"
uacauctuggagagcuugauguc

SEQ ID NO: 2213 - RNA, 23 nt, Artificial Sequence
  source: /note="Description of Artificial Sequence: Synthetic oligonucleotide"
ucuuuucacaucuuggagagcuu

SEQ ID NO: 2214 - DNA, 23 bp, Artificial Sequence
  source: /note="Description of Artificial Sequence: Synthetic oligonucleotide"
  source: /note="Description of Combined DNA/RNA Molecule: Synthetic oligonucleotide"
uggcuutucacaucuuggagagc

SEQ ID NO: 2215 - RNA, 23 nt, Artificial Sequence
  source: /note="Description of Artificial Sequence: Synthetic oligonucleotide"
ucucagacuacaauuccugaaua

SEQ ID NO: 2216 - DNA, 23 bp, Artificial Sequence
  source: /note="Description of Artificial Sequence: Synthetic oligonucleotide"
  source: /note="Description of Combined DNA/RNA Molecule: Synthetic oligonucleotide"
uauaaatgcugacagaagauaaa

SEQ ID NO: 2217 - RNA, 23 nt, Artificial Sequence
  source: /note="Description of Artificial Sequence: Synthetic oligonucleotide"
ucauaaaugcugacagaagauaa

SEQ ID NO: 2218 - RNA, 23 nt, Artificial Sequence
  source: /note="Description of Artificial Sequence: Synthetic oligonucleotide"
uccauaaaugcugacagaagaua

SEQ ID NO: 2219 - RNA, 23 nt, Artificial Sequence
  source: /note="Description of Artificial Sequence: Synthetic oligonucleotide"
ucccauaaaugcugacagaagau

SEQ ID NO: 2220 - RNA, 23 nt, Artificial Sequence
  source: /note="Description of Artificial Sequence: Synthetic oligonucleotide"
uaucccauaaaugcugacagaag

SEQ ID NO: 2221 - RNA, 23 nt, Artificial Sequence
  source: /note="Description of Artificial Sequence: Synthetic oligonucleotide"
ucaucccauaaaugcugacagaa

SEQ ID NO: 2222 - DNA, 23 bp, Artificial Sequence
  source: /note="Description of Artificial Sequence: Synthetic oligonucleotide"
  source: /note="Description of Combined DNA/RNA Molecule: Synthetic oligonucleotide"
uaaacatcccauaaaugcugaca

SEQ ID NO: 2223 - RNA, 23 nt, Artificial Sequence
  source: /note="Description of Artificial Sequence: Synthetic oligonucleotide"
uuaaacaucccauaaaugcugac

SEQ ID NO: 2224 - RNA, 23 nt, Artificial Sequence
  source: /note="Description of Artificial Sequence: Synthetic oligonucleotide"
uuuaaacaucccauaaaugcuga

SEQ ID NO: 2225 - RNA, 23 nt, Artificial Sequence
  source: /note="Description of Artificial Sequence: Synthetic oligonucleotide"
ucauuaaacaucccauaaaugcu

SEQ ID NO: 2226 - RNA, 23 nt, Artificial Sequence
  source: /note="Description of Artificial Sequence: Synthetic oligonucleotide"
uucauuaaacaucccauaaaugc

SEQ ID NO: 2227 - DNA, 23 bp, Artificial Sequence
  source: /note="Description of Artificial Sequence: Synthetic oligonucleotide"
  source: /note="Description of Combined DNA/RNA Molecule: Synthetic oligonucleotide"
uaacuatgucauuaaacauccca

SEQ ID NO: 2228 - RNA, 23 nt, Artificial Sequence
  source: /note="Description of Artificial Sequence: Synthetic oligonucleotide"
ugaacuaugucauuaaacauccc

SEQ ID NO: 2229 - DNA, 23 bp, Artificial Sequence
  source: /note="Description of Artificial Sequence: Synthetic oligonucleotide"
  source: /note="Description of Combined DNA/RNA Molecule: Synthetic oligonucleotide"
uugaactaugucauuaaacaucc

SEQ ID NO: 2230 - RNA, 23 nt, Artificial Sequence
  source: /note="Description of Artificial Sequence: Synthetic oligonucleotide"
ucuugaacuaugucauuaaacau

SEQ ID NO: 2231 - RNA, 23 nt, Artificial Sequence
  source: /note="Description of Artificial Sequence: Synthetic oligonucleotide"
uacuugaacuaugucauuaaaca

SEQ ID NO: 2232 - RNA, 23 nt, Artificial Sequence
  source: /note="Description of Artificial Sequence: Synthetic oligonucleotide"
uagaaaacuugaacuaugucauu

SEQ ID NO: 2233 - RNA, 23 nt, Artificial Sequence
  source: /note="Description of Artificial Sequence: Synthetic oligonucleotide"
uaagaaaacuugaacuaugucau

SEQ ID NO: 2234 - RNA, 23 nt, Artificial Sequence
  source: /note="Description of Artificial Sequence: Synthetic oligonucleotide"
ucaagaaaacuugaacuauguca

SEQ ID NO: 2235 - RNA, 23 nt, Artificial Sequence
  source: /note="Description of Artificial Sequence: Synthetic oligonucleotide"
uacaagaaaacuugaacuauguc

SEQ ID NO: 2236 - RNA, 23 nt, Artificial Sequence
  source: /note="Description of Artificial Sequence: Synthetic oligonucleotide"
ucacaagaaaacuugaacuaugu

SEQ ID NO: 2237 - RNA, 23 nt, Artificial Sequence
  source: /note="Description of Artificial Sequence: Synthetic oligonucleotide"
uucacaagaaaacuugaacuaug

SEQ ID NO: 2238 - RNA, 23 nt, Artificial Sequence
  source: /note="Description of Artificial Sequence: Synthetic oligonucleotide"
uaucacaagaaaacuugaacuau

SEQ ID NO: 2239 - RNA, 23 nt, Artificial Sequence
  source: /note="Description of Artificial Sequence: Synthetic oligonucleotide"
uaaucacaagaaaacuugaacua

SEQ ID NO: 2240 - RNA, 23 nt, Artificial Sequence
  source: /note="Description of Artificial Sequence: Synthetic oligonucleotide"
ucaaaucacaagaaaacuugaac

SEQ ID NO: 2241 - DNA, 23 bp, Artificial Sequence
  source: /note="Description of Artificial Sequence: Synthetic oligonucleotide"
  source: /note="Description of Combined DNA/RNA Molecule: Synthetic oligonucleotide"
ugguuutcaggaagaaacuauua

SEQ ID NO: 2242 - RNA, 23 nt, Artificial Sequence
  source: /note="Description of Artificial Sequence: Synthetic oligonucleotide"
ugcaaugguuuucaggaagaaac

SEQ ID NO: 2243 - DNA, 23 bp, Artificial Sequence
  source: /note="Description of Artificial Sequence: Synthetic oligonucleotide"
  source: /note="Description of Combined DNA/RNA Molecule: Synthetic oligonucleotide"
uagcaatgguuuucaggaagaaa

SEQ ID NO: 2244 - RNA, 23 nt, Artificial Sequence
  source: /note="Description of Artificial Sequence: Synthetic oligonucleotide"
uagagcaaugguuuucaggaaga

SEQ ID NO: 2245 - RNA, 23 nt, Artificial Sequence
  source: /note="Description of Artificial Sequence: Synthetic oligonucleotide"
uaugcaagagcaaugguuuucag

SEQ ID NO: 2246 - RNA, 23 nt, Artificial Sequence
  source: /note="Description of Artificial Sequence: Synthetic oligonucleotide"
ucaugcaagagcaaugguuuuca

SEQ ID NO: 2247 - RNA, 23 nt, Artificial Sequence
  source: /note="Description of Artificial Sequence: Synthetic oligonucleotide"
uaacaugcaagagcaaugguuuu

SEQ ID NO: 2248 - DNA, 23 bp, Artificial Sequence
  source: /note="Description of Artificial Sequence: Synthetic oligonucleotide"
  source: /note="Description of Combined DNA/RNA Molecule: Synthetic oligonucleotide"
uuaacatgcaagagcaaugguuu

SEQ ID NO: 2249 - RNA, 23 nt, Artificial Sequence
  source: /note="Description of Artificial Sequence: Synthetic oligonucleotide"
uguaacaugcaagagcaaugguu

SEQ ID NO: 2250 - RNA, 23 nt, Artificial Sequence
  source: /note="Description of Artificial Sequence: Synthetic oligonucleotide"
uuguaacaugcaagagcaauggu

SEQ ID NO: 2251 - RNA, 23 nt, Artificial Sequence
  source: /note="Description of Artificial Sequence: Synthetic oligonucleotide"
uauguaacaugcaagagcaaugg

SEQ ID NO: 2252 - RNA, 23 nt, Artificial Sequence
  source: /note="Description of Artificial Sequence: Synthetic oligonucleotide"
ucauguaacaugcaagagcaaug

SEQ ID NO: 2253 - DNA, 23 bp, Artificial Sequence
  source: /note="Description of Artificial Sequence: Synthetic oligonucleotide"
  source: /note="Description of Combined DNA/RNA Molecule: Synthetic oligonucleotide"
uccaugtaacaugcaagagcaau

SEQ ID NO: 2254 - RNA, 23 nt, Artificial Sequence
  source: /note="Description of Artificial Sequence: Synthetic oligonucleotide"
uaccauguaacaugcaagagcaa

SEQ ID NO: 2255 - DNA, 23 bp, Artificial Sequence
  source: /note="Description of Artificial Sequence: Synthetic oligonucleotide"
  source: /note="Description of Combined DNA/RNA Molecule: Synthetic oligonucleotide"
uaaccatguaacaugcaagagca

SEQ ID NO: 2256 - RNA, 23 nt, Artificial Sequence
  source: /note="Description of Artificial Sequence: Synthetic oligonucleotide"
uuaaccauguaacaugcaagagc

SEQ ID NO: 2257 - RNA, 23 nt, Artificial Sequence
  source: /note="Description of Artificial Sequence: Synthetic oligonucleotide"
uguaaccauguaacaugcaagag

SEQ ID NO: 2258 - RNA, 23 nt, Artificial Sequence
  source: /note="Description of Artificial Sequence: Synthetic oligonucleotide"
ugguaaccauguaacaugcaaga

SEQ ID NO: 2259 - RNA, 23 nt, Artificial Sequence
  source: /note="Description of Artificial Sequence: Synthetic oligonucleotide"
uugguaaccauguaacaugcaag

SEQ ID NO: 2260 - RNA, 23 nt, Artificial Sequence
  source: /note="Description of Artificial Sequence: Synthetic oligonucleotide"
ugugguaaccauguaacaugcaa

SEQ ID NO: 2261 - RNA, 23 nt, Artificial Sequence
  source: /note="Description of Artificial Sequence: Synthetic oligonucleotide"
uccuuuagaaguuaugcuuuuua

SEQ ID NO: 2262 - DNA, 23 bp, Artificial Sequence
  source: /note="Description of Artificial Sequence: Synthetic oligonucleotide"
  source: /note="Description of Combined DNA/RNA Molecule: Synthetic oligonucleotide"
uuccuutagaaguuaugcuuuuu

SEQ ID NO: 2263 - DNA, 23 bp, Artificial Sequence
  source: /note="Description of Artificial Sequence: Synthetic oligonucleotide"
  source: /note="Description of Combined DNA/RNA Molecule: Synthetic oligonucleotide"
uuuccutuagaaguuaugcuuuu

SEQ ID NO: 2264 - DNA, 23 bp, Artificial Sequence
  source: /note="Description of Artificial Sequence: Synthetic oligonucleotide"
  source: /note="Description of Combined DNA/RNA Molecule: Synthetic oligonucleotide"
ucuucctuuagaaguuaugcuuu

SEQ ID NO: 2265 - RNA, 23 nt, Artificial Sequence
  source: /note="Description of Artificial Sequence: Synthetic oligonucleotide"
ucuauucugcuuccuuuagaagu

SEQ ID NO: 2266 - DNA, 23 bp, Artificial Sequence
  source: /note="Description of Artificial Sequence: Synthetic oligonucleotide"
  source: /note="Description of Combined DNA/RNA Molecule: Synthetic oligonucleotide"
ugcuautcugcuuccuuuagaag

SEQ ID NO: 2267 - DNA, 23 bp, Artificial Sequence
  source: /note="Description of Artificial Sequence: Synthetic oligonucleotide"
  source: /note="Description of Combined DNA/RNA Molecule: Synthetic oligonucleotide"
uagcuatucugcuuccuuuagaa

SEQ ID NO: 2268 - RNA, 23 nt, Artificial Sequence
  source: /note="Description of Artificial Sequence: Synthetic oligonucleotide"
uguaguaaaugcaucuuacuuau

SEQ ID NO: 2269 - RNA, 23 nt, Artificial Sequence
  source: /note="Description of Artificial Sequence: Synthetic oligonucleotide"
ucugaagcauuagaagccaacug

SEQ ID NO: 2270 - DNA, 23 bp, Artificial Sequence
  source: /note="Description of Artificial Sequence: Synthetic oligonucleotide"
  source: /note="Description of Combined DNA/RNA Molecule: Synthetic oligonucleotide"
ucuauctgaagcauuagaagcca

SEQ ID NO: 2271 - DNA, 23 bp, Artificial Sequence
  source: /note="Description of Artificial Sequence: Synthetic oligonucleotide"
  source: /note="Description of Combined DNA/RNA Molecule: Synthetic oligonucleotide"
uuucuatcugaagcauuagaagc

SEQ ID NO: 2272 - RNA, 23 nt, Artificial Sequence
  source: /note="Description of Artificial Sequence: Synthetic oligonucleotide"
uauucuaucugaagcauuagaag

SEQ ID NO: 2273 - DNA, 23 bp, Artificial Sequence
  source: /note="Description of Artificial Sequence: Synthetic oligonucleotide"
  source: /note="Description of Combined DNA/RNA Molecule: Synthetic oligonucleotide"
ucuguatucuaucugaagcauua

SEQ ID NO: 2274 - RNA, 23 nt, Artificial Sequence
  source: /note="Description of Artificial Sequence: Synthetic oligonucleotide"
uacuguauucuaucugaagcauu

SEQ ID NO: 2275 - RNA, 23 nt, Artificial Sequence
  source: /note="Description of Artificial Sequence: Synthetic oligonucleotide"
ucaacuguauucuaucugaagca

SEQ ID NO: 2276 - DNA, 23 bp, Artificial Sequence
  source: /note="Description of Artificial Sequence: Synthetic oligonucleotide"
  source: /note="Description of Combined DNA/RNA Molecule: Synthetic oligonucleotide"
uccaactguauucuaucugaagc

SEQ ID NO: 2277 - DNA, 21 bp, Artificial Sequence
  source: /note="Description of Artificial Sequence: Synthetic oligonucleotide"
  source: /note="Description of Combined DNA/RNA Molecule: Synthetic oligonucleotide"
cagcacagcagagcuuuccaa

SEQ ID NO: 2278 - DNA, 21 bp, Artificial Sequence
  source: /note="Description of Artificial Sequence: Synthetic oligonucleotide"
  source: /note="Description of Combined DNA/RNA Molecule: Synthetic oligonucleotide"
agcacagcagagcuuuccaga

SEQ ID NO: 2279 - DNA, 21 bp, Artificial Sequence
  source: /note="Description of Artificial Sequence: Synthetic oligonucleotide"
  source: /note="Description of Combined DNA/RNA Molecule: Synthetic oligonucleotide"
agguucuucugugcacguuga

SEQ ID NO: 2280 - DNA, 21 bp, Artificial Sequence
  source: /note="Description of Artificial Sequence: Synthetic oligonucleotide"
  source: /note="Description of Combined DNA/RNA Molecule: Synthetic oligonucleotide"
gguucuuctgtgcacguugca

SEQ ID NO: 2281 - DNA, 21 bp, Artificial Sequence
  source: /note="Description of Artificial Sequence: Synthetic oligonucleotide"
  source: /note="Description of Combined DNA/RNA Molecule: Synthetic oligonucleotide"
gccagucccaaugaauccaga

SEQ ID NO: 2282 - DNA, 21 bp, Artificial Sequence
  source: /note="Description of Artificial Sequence: Synthetic oligonucleotide"
  source: /note="Description of Combined DNA/RNA Molecule: Synthetic oligonucleotide"
uccgagacaagucaguucuga

SEQ ID NO: 2283 - DNA, 21 bp, Artificial Sequence
  source: /note="Description of Artificial Sequence: Synthetic oligonucleotide"
  source: /note="Description of Combined DNA/RNA Molecule: Synthetic oligonucleotide"
ccgagacaagtcaguucugga

SEQ ID NO: 2284 - DNA, 21 bp, Artificial Sequence
  source: /note="Description of Artificial Sequence: Synthetic oligonucleotide"
  source: /note="Description of Combined DNA/RNA Molecule: Synthetic oligonucleotide"
aggcuccagagaaguuucuaa

SEQ ID NO: 2285 - DNA, 21 bp, Artificial Sequence
  source: /note="Description of Artificial Sequence: Synthetic oligonucleotide"
  source: /note="Description of Combined DNA/RNA Molecule: Synthetic oligonucleotide"
ggcuccagagaaguuucuaca

SEQ ID NO: 2286 - DNA, 21 bp, Artificial Sequence
  source: /note="Description of Artificial Sequence: Synthetic oligonucleotide"
  source: /note="Description of Combined DNA/RNA Molecule: Synthetic oligonucleotide"
guggaauutggacacuuugga

SEQ ID NO: 2287 - DNA, 21 bp, Artificial Sequence
  source: /note="Description of Artificial Sequence: Synthetic oligonucleotide"
  source: /note="Description of Combined DNA/RNA Molecule: Synthetic oligonucleotide"
uggaauuuggacacuuuggca

SEQ ID NO: 2288 - DNA, 21 bp, Artificial Sequence
  source: /note="Description of Artificial Sequence: Synthetic oligonucleotide"
  source: /note="Description of Combined DNA/RNA Molecule: Synthetic oligonucleotide"
ggaauuuggacacuuuggcca

SEQ ID NO: 2289 - DNA, 21 bp, Artificial Sequence
  source: /note="Description of Artificial Sequence: Synthetic oligonucleotide"
  source: /note="Description of Combined DNA/RNA Molecule: Synthetic oligonucleotide"
gaauuuggacacuuuggccua

SEQ ID NO: 2290 - DNA, 21 bp, Artificial Sequence
  source: /note="Description of Artificial Sequence: Synthetic oligonucleotide"
  source: /note="Description of Combined DNA/RNA Molecule: Synthetic oligonucleotide"
ggacacuutggccuuccagga

SEQ ID NO: 2291 - DNA, 21 bp, Artificial Sequence
  source: /note="Description of Artificial Sequence: Synthetic oligonucleotide"
  source: /note="Description of Combined DNA/RNA Molecule: Synthetic oligonucleotide"
uccaggaacugaaguccgaga

SEQ ID NO: 2292 - DNA, 21 bp, Artificial Sequence
  source: /note="Description of Artificial Sequence: Synthetic oligonucleotide"
  source: /note="Description of Combined DNA/RNA Molecule: Synthetic oligonucleotide"
acugaaguccgagcuaacuga

SEQ ID NO: 2293 - DNA, 21 bp, Artificial Sequence
  source: /note="Description of Artificial Sequence: Synthetic oligonucleotide"
  source: /note="Description of Combined DNA/RNA Molecule: Synthetic oligonucleotide"
cgagcuaacugaaguuccuga

SEQ ID NO: 2294 - DNA, 21 bp, Artificial Sequence
  source: /note="Description of Artificial Sequence: Synthetic oligonucleotide"
  source: /note="Description of Combined DNA/RNA Molecule: Synthetic oligonucleotide"
acugaagutccugcuucccga

SEQ ID NO: 2295 - DNA, 21 bp, Artificial Sequence
  source: /note="Description of Artificial Sequence: Synthetic oligonucleotide"
  source: /note="Description of Combined DNA/RNA Molecule: Synthetic oligonucleotide"
guuccugctucccgaauuuua

SEQ ID NO: 2296 - DNA, 21 bp, Artificial Sequence
  source: /note="Description of Artificial Sequence: Synthetic oligonucleotide"
  source: /note="Description of Combined DNA/RNA Molecule: Synthetic oligonucleotide"
uccugcuucccgaauuuugaa

SEQ ID NO: 2297 - DNA, 21 bp, Artificial Sequence
  source: /note="Description of Artificial Sequence: Synthetic oligonucleotide"
  source: /note="Description of Combined DNA/RNA Molecule: Synthetic oligonucleotide"
ccugcuucccgaauuuugaaa

SEQ ID NO: 2298 - DNA, 21 bp, Artificial Sequence
  source: /note="Description of Artificial Sequence: Synthetic oligonucleotide"
  source: /note="Description of Combined DNA/RNA Molecule: Synthetic oligonucleotide"
cugcuucccgaauuuugaaga

SEQ ID NO: 2299 - DNA, 21 bp, Artificial Sequence
  source: /note="Description of Artificial Sequence: Synthetic oligonucleotide"
  source: /note="Description of Combined DNA/RNA Molecule: Synthetic oligonucleotide"
ugcuucccgaauuuugaagga

SEQ ID NO: 2300 - DNA, 21 bp, Artificial Sequence
  source: /note="Description of Artificial Sequence: Synthetic oligonucleotide"
  source: /note="Description of Combined DNA/RNA Molecule: Synthetic oligonucleotide"
cuucccgaautuugaaggaga

SEQ ID NO: 2301 - DNA, 21 bp, Artificial Sequence
  source: /note="Description of Artificial Sequence: Synthetic oligonucleotide"
  source: /note="Description of Combined DNA/RNA Molecule: Synthetic oligonucleotide"
gauguggagaacuaguuugga

SEQ ID NO: 2302 - DNA, 21 bp, Artificial Sequence
  source: /note="Description of Artificial Sequence: Synthetic oligonucleotide"
  source: /note="Description of Combined DNA/RNA Molecule: Synthetic oligonucleotide"
auguggagaacuaguuuggga

SEQ ID NO: 2303 - DNA, 21 bp, Artificial Sequence
  source: /note="Description of Artificial Sequence: Synthetic oligonucleotide"
  source: /note="Description of Combined DNA/RNA Molecule: Synthetic oligonucleotide"
uguggagaactaguuugggua

SEQ ID NO: 2304 - DNA, 21 bp, Artificial Sequence
  source: /note="Description of Artificial Sequence: Synthetic oligonucleotide"
  source: /note="Description of Combined DNA/RNA Molecule: Synthetic oligonucleotide"
uggagaactaguuuggguaga

SEQ ID NO: 2305 - DNA, 21 bp, Artificial Sequence
  source: /note="Description of Artificial Sequence: Synthetic oligonucleotide"
  source: /note="Description of Combined DNA/RNA Molecule: Synthetic oligonucleotide"
ggagaacuagtuuggguagga

SEQ ID NO: 2306 - DNA, 21 bp, Artificial Sequence
  source: /note="Description of Artificial Sequence: Synthetic oligonucleotide"
  source: /note="Description of Combined DNA/RNA Molecule: Synthetic oligonucleotide"
agaacuagtutggguaggaga

SEQ ID NO: 2307 - DNA, 21 bp, Artificial Sequence
  source: /note="Description of Artificial Sequence: Synthetic oligonucleotide"
  source: /note="Description of Combined DNA/RNA Molecule: Synthetic oligonucleotide"
aacagcagaaacaauuacuga

SEQ ID NO: 2308 - DNA, 21 bp, Artificial Sequence
  source: /note="Description of Artificial Sequence: Synthetic oligonucleotide"
  source: /note="Description of Combined DNA/RNA Molecule: Synthetic oligonucleotide"
acagcagaaacaauuacugga

SEQ ID NO: 2309 - DNA, 21 bp, Artificial Sequence
  source: /note="Description of Artificial Sequence: Synthetic oligonucleotide"
  source: /note="Description of Combined DNA/RNA Molecule: Synthetic oligonucleotide"
aacaauuacuggcaaguauga

SEQ ID NO: 2310 - DNA, 21 bp, Artificial Sequence
  source: /note="Description of Artificial Sequence: Synthetic oligonucleotide"
  source: /note="Description of Combined DNA/RNA Molecule: Synthetic oligonucleotide"
acaauuactggcaaguaugga

SEQ ID NO: 2311 - DNA, 21 bp, Artificial Sequence
  source: /note="Description of Artificial Sequence: Synthetic oligonucleotide"
  source: /note="Description of Combined DNA/RNA Molecule: Synthetic oligonucleotide"
caauuacuggcaaguauggua

SEQ ID NO: 2312 - DNA, 21 bp, Artificial Sequence
  source: /note="Description of Artificial Sequence: Synthetic oligonucleotide"
  source: /note="Description of Combined DNA/RNA Molecule: Synthetic oligonucleotide"
aauuacuggcaaguaugguga

SEQ ID NO: 2313 - DNA, 21 bp, Artificial Sequence
  source: /note="Description of Artificial Sequence: Synthetic oligonucleotide"
  source: /note="Description of Combined DNA/RNA Molecule: Synthetic oligonucleotide"
auuacuggcaaguauggugua

SEQ ID NO: 2314 - DNA, 21 bp, Artificial Sequence
  source: /note="Description of Artificial Sequence: Synthetic oligonucleotide"
  source: /note="Description of Combined DNA/RNA Molecule: Synthetic oligonucleotide"
uuacuggcaaguaugguguga

SEQ ID NO: 2315 - DNA, 21 bp, Artificial Sequence
  source: /note="Description of Artificial Sequence: Synthetic oligonucleotide"
  source: /note="Description of Combined DNA/RNA Molecule: Synthetic oligonucleotide"
guauggugtgtggaugcgaga

SEQ ID NO: 2316 - DNA, 21 bp, Artificial Sequence
  source: /note="Description of Artificial Sequence: Synthetic oligonucleotide"
  source: /note="Description of Combined DNA/RNA Molecule: Synthetic oligonucleotide"
gauguccgccagguuuuugaa

SEQ ID NO: 2317 - DNA, 21 bp, Artificial Sequence
  source: /note="Description of Artificial Sequence: Synthetic oligonucleotide"
  source: /note="Description of Combined DNA/RNA Molecule: Synthetic oligonucleotide"
uuugaguatgaccucaucaga

SEQ ID NO: 2318 - DNA, 21 bp, Artificial Sequence
  source: /note="Description of Artificial Sequence: Synthetic oligonucleotide"
  source: /note="Description of Combined DNA/RNA Molecule: Synthetic oligonucleotide"
accucaucagccaguuuauga

SEQ ID NO: 2319 - DNA, 21 bp, Artificial Sequence
  source: /note="Description of Artificial Sequence: Synthetic oligonucleotide"
  source: /note="Description of Combined DNA/RNA Molecule: Synthetic oligonucleotide"
ccucaucagccaguuuaugca

SEQ ID NO: 2320 - DNA, 21 bp, Artificial Sequence
  source: /note="Description of Artificial Sequence: Synthetic oligonucleotide"
  source: /note="Description of Combined DNA/RNA Molecule: Synthetic oligonucleotide"
ucaucagccaguuuaugcaga

SEQ ID NO: 2321 - DNA, 21 bp, Artificial Sequence
  source: /note="Description of Artificial Sequence: Synthetic oligonucleotide"
  source: /note="Description of Combined DNA/RNA Molecule: Synthetic oligonucleotide"
gcagggcuacccuucuaagga

SEQ ID NO: 2322 - DNA, 21 bp, Artificial Sequence
  source: /note="Description of Artificial Sequence: Synthetic oligonucleotide"
  source: /note="Description of Combined DNA/RNA Molecule: Synthetic oligonucleotide"
cagggcuacccuucuaaggua

SEQ ID NO: 2323 - DNA, 21 bp, Artificial Sequence
  source: /note="Description of Artificial Sequence: Synthetic oligonucleotide"
  source: /note="Description of Combined DNA/RNA Molecule: Synthetic oligonucleotide"
gggcuacccutcuaagguuca

SEQ ID NO: 2324 - DNA, 21 bp, Artificial Sequence
  source: /note="Description of Artificial Sequence: Synthetic oligonucleotide"
  source: /note="Description of Combined DNA/RNA Molecule: Synthetic oligonucleotide"
cuucuaaggutcacauacuga

SEQ ID NO: 2325 - DNA, 21 bp, Artificial Sequence
  source: /note="Description of Artificial Sequence: Synthetic oligonucleotide"
  source: /note="Description of Combined DNA/RNA Molecule: Synthetic oligonucleotide"
uucuaaggtucacauacugca

SEQ ID NO: 2326 - DNA, 21 bp, Artificial Sequence
  source: /note="Description of Artificial Sequence: Synthetic oligonucleotide"
  source: /note="Description of Combined DNA/RNA Molecule: Synthetic oligonucleotide"
guccagaacugucauaagaua

SEQ ID NO: 2327 - DNA, 21 bp, Artificial Sequence
  source: /note="Description of Artificial Sequence: Synthetic oligonucleotide"
  source: /note="Description of Combined DNA/RNA Molecule: Synthetic oligonucleotide"
cagaacugtcauaagauauga

SEQ ID NO: 2328 - DNA, 21 bp, Artificial Sequence
  source: /note="Description of Artificial Sequence: Synthetic oligonucleotide"
  source: /note="Description of Combined DNA/RNA Molecule: Synthetic oligonucleotide"
agaacugucataagauaugaa

SEQ ID NO: 2329 - DNA, 21 bp, Artificial Sequence
  source: /note="Description of Artificial Sequence: Synthetic oligonucleotide"
  source: /note="Description of Combined DNA/RNA Molecule: Synthetic oligonucleotide"
gaacugucauaagauaugaga

SEQ ID NO: 2330 - DNA, 21 bp, Artificial Sequence
  source: /note="Description of Artificial Sequence: Synthetic oligonucleotide"
  source: /note="Description of Combined DNA/RNA Molecule: Synthetic oligonucleotide"
aacugucataagauaugagca

SEQ ID NO: 2331 - DNA, 21 bp, Artificial Sequence
  source: /note="Description of Artificial Sequence: Synthetic oligonucleotide"
  source: /note="Description of Combined DNA/RNA Molecule: Synthetic oligonucleotide"
aagauaugagcugaauaccga

SEQ ID NO: 2332 - DNA, 21 bp, Artificial Sequence
  source: /note="Description of Artificial Sequence: Synthetic oligonucleotide"
  source: /note="Description of Combined DNA/RNA Molecule: Synthetic oligonucleotide"
agauaugagctgaauaccgaa

SEQ ID NO: 2333 - DNA, 21 bp, Artificial Sequence
  source: /note="Description of Artificial Sequence: Synthetic oligonucleotide"
  source: /note="Description of Combined DNA/RNA Molecule: Synthetic oligonucleotide"
gauaugagcugaauaccgaga

SEQ ID NO: 2334 - DNA, 21 bp, Artificial Sequence
  source: /note="Description of Artificial Sequence: Synthetic oligonucleotide"
  source: /note="Description of Combined DNA/RNA Molecule: Synthetic oligonucleotide"
ugaauaccgagacagugaaga

SEQ ID NO: 2335 - DNA, 21 bp, Artificial Sequence
  source: /note="Description of Artificial Sequence: Synthetic oligonucleotide"
  source: /note="Description of Combined DNA/RNA Molecule: Synthetic oligonucleotide"
gaauaccgagacagugaagga

SEQ ID NO: 2336 - DNA, 21 bp, Artificial Sequence
  source: /note="Description of Artificial Sequence: Synthetic oligonucleotide"
  source: /note="Description of Combined DNA/RNA Molecule: Synthetic oligonucleotide"
accacggacaguucccguaua

SEQ ID NO: 2337 - DNA, 21 bp, Artificial Sequence
  source: /note="Description of Artificial Sequence: Synthetic oligonucleotide"
  source: /note="Description of Combined DNA/RNA Molecule: Synthetic oligonucleotide"
cggacagutcccguauucuua

SEQ ID NO: 2338 - DNA, 21 bp, Artificial Sequence
  source: /note="Description of Artificial Sequence: Synthetic oligonucleotide"
  source: /note="Description of Combined DNA/RNA Molecule: Synthetic oligonucleotide"
ggacaguucccguauucuuga

SEQ ID NO: 2339 - DNA, 21 bp, Artificial Sequence
  source: /note="Description of Artificial Sequence: Synthetic oligonucleotide"
  source: /note="Description of Combined DNA/RNA Molecule: Synthetic oligonucleotide"
gacaguucccguauucuugga

SEQ ID NO: 2340 - DNA, 21 bp, Artificial Sequence
  source: /note="Description of Artificial Sequence: Synthetic oligonucleotide"
  source: /note="Description of Combined DNA/RNA Molecule: Synthetic oligonucleotide"
caggccuctgggucauuuaca

SEQ ID NO: 2341 - DNA, 21 bp, Artificial Sequence
  source: /note="Description of Artificial Sequence: Synthetic oligonucleotide"
  source: /note="Description of Combined DNA/RNA Molecule: Synthetic oligonucleotide"
aggccucugggucauuuacaa

SEQ ID NO: 2342 - DNA, 21 bp, Artificial Sequence
  source: /note="Description of Artificial Sequence: Synthetic oligonucleotide"
  source: /note="Description of Combined DNA/RNA Molecule: Synthetic oligonucleotide"
ggccucugggtcauuuacaga

SEQ ID NO: 2343 - DNA, 21 bp, Artificial Sequence
  source: /note="Description of Artificial Sequence: Synthetic oligonucleotide"
  source: /note="Description of Combined DNA/RNA Molecule: Synthetic oligonucleotide"
aggccaaaggtgccauuguca

SEQ ID NO: 2344 - DNA, 21 bp, Artificial Sequence
  source: /note="Description of Artificial Sequence: Synthetic oligonucleotide"
  source: /note="Description of Combined DNA/RNA Molecule: Synthetic oligonucleotide"
ccauuguccucuccaaacuga

SEQ ID NO: 2345 - DNA, 21 bp, Artificial Sequence
  source: /note="Description of Artificial Sequence: Synthetic oligonucleotide"
  source: /note="Description of Combined DNA/RNA Molecule: Synthetic oligonucleotide"
gucgccaatgccuucaucaua

SEQ ID NO: 2346 - DNA, 21 bp, Artificial Sequence
  source: /note="Description of Artificial Sequence: Synthetic oligonucleotide"
  source: /note="Description of Combined DNA/RNA Molecule: Synthetic oligonucleotide"
uaccgucaactuugcuuauga

SEQ ID NO: 2347 - DNA, 21 bp, Artificial Sequence
  source: /note="Description of Artificial Sequence: Synthetic oligonucleotide"
  source: /note="Description of Combined DNA/RNA Molecule: Synthetic oligonucleotide"
accgucaacutugcuuaugaa

SEQ ID NO: 2348 - DNA, 21 bp, Artificial Sequence
  source: /note="Description of Artificial Sequence: Synthetic oligonucleotide"
  source: /note="Description of Combined DNA/RNA Molecule: Synthetic oligonucleotide"
ccgucaactutgcuuaugaca

SEQ ID NO: 2349 - DNA, 21 bp, Artificial Sequence
  source: /note="Description of Artificial Sequence: Synthetic oligonucleotide"
  source: /note="Description of Combined DNA/RNA Molecule: Synthetic oligonucleotide"
uaugacacaggcacagguaua

SEQ ID NO: 2350 - DNA, 21 bp, Artificial Sequence
  source: /note="Description of Artificial Sequence: Synthetic oligonucleotide"
  source: /note="Description of Combined DNA/RNA Molecule: Synthetic oligonucleotide"
acccugaccatcccauucaaa

SEQ ID NO: 2351 - DNA, 21 bp, Artificial Sequence
  source: /note="Description of Artificial Sequence: Synthetic oligonucleotide"
  source: /note="Description of Combined DNA/RNA Molecule: Synthetic oligonucleotide"
cccugaccaucccauucaaga

SEQ ID NO: 2352 - DNA, 21 bp, Artificial Sequence
  source: /note="Description of Artificial Sequence: Synthetic oligonucleotide"
  source: /note="Description of Combined DNA/RNA Molecule: Synthetic oligonucleotide"
accaucccautcaagaaccga

SEQ ID NO: 2353 - DNA, 21 bp, Artificial Sequence
  source: /note="Description of Artificial Sequence: Synthetic oligonucleotide"
  source: /note="Description of Combined DNA/RNA Molecule: Synthetic oligonucleotide"
ccaucccatucaagaaccgca

SEQ ID NO: 2354 - DNA, 21 bp, Artificial Sequence
  source: /note="Description of Artificial Sequence: Synthetic oligonucleotide"
  source: /note="Description of Combined DNA/RNA Molecule: Synthetic oligonucleotide"
uaaguacagcagcaugauuga

SEQ ID NO: 2355 - DNA, 21 bp, Artificial Sequence
  source: /note="Description of Artificial Sequence: Synthetic oligonucleotide"
  source: /note="Description of Combined DNA/RNA Molecule: Synthetic oligonucleotide"
aaguacagcagcaugauugaa

SEQ ID NO: 2356 - DNA, 21 bp, Artificial Sequence
  source: /note="Description of Artificial Sequence: Synthetic oligonucleotide"
  source: /note="Description of Combined DNA/RNA Molecule: Synthetic oligonucleotide"
guacagcagcaugauugacua

SEQ ID NO: 2357 - DNA, 21 bp, Artificial Sequence
  source: /note="Description of Artificial Sequence: Synthetic oligonucleotide"
  source: /note="Description of Combined DNA/RNA Molecule: Synthetic oligonucleotide"
ucuuugcctgggacaacuuga

SEQ ID NO: 2358 - DNA, 21 bp, Artificial Sequence
  source: /note="Description of Artificial Sequence: Synthetic oligonucleotide"
  source: /note="Description of Combined DNA/RNA Molecule: Synthetic oligonucleotide"
ugaacauggucacuuaugaca

SEQ ID NO: 2359 - DNA, 21 bp, Artificial Sequence
  source: /note="Description of Artificial Sequence: Synthetic oligonucleotide"
  source: /note="Description of Combined DNA/RNA Molecule: Synthetic oligonucleotide"
aucaagcucuccaagauguga

SEQ ID NO: 2360 - DNA, 21 bp, Artificial Sequence
  source: /note="Description of Artificial Sequence: Synthetic oligonucleotide"
  source: /note="Description of Combined DNA/RNA Molecule: Synthetic oligonucleotide"
ucaagcuctccaagaugugaa

SEQ ID NO: 2361 - DNA, 21 bp, Artificial Sequence
  source: /note="Description of Artificial Sequence: Synthetic oligonucleotide"
  source: /note="Description of Combined DNA/RNA Molecule: Synthetic oligonucleotide"
uucaggaatuguagucugaga

SEQ ID NO: 2362 - DNA, 21 bp, Artificial Sequence
  source: /note="Description of Artificial Sequence: Synthetic oligonucleotide"
  source: /note="Description of Combined DNA/RNA Molecule: Synthetic oligonucleotide"
uaucuucugucagcauuuaua

SEQ ID NO: 2363 - DNA, 21 bp, Artificial Sequence
  source: /note="Description of Artificial Sequence: Synthetic oligonucleotide"
  source: /note="Description of Combined DNA/RNA Molecule: Synthetic oligonucleotide"
aucuucugtcagcauuuauga

SEQ ID NO: 2364 - DNA, 21 bp, Artificial Sequence
  source: /note="Description of Artificial Sequence: Synthetic oligonucleotide"
  source: /note="Description of Combined DNA/RNA Molecule: Synthetic oligonucleotide"
ucuucugucagcauuuaugga

SEQ ID NO: 2365 - DNA, 21 bp, Artificial Sequence
  source: /note="Description of Artificial Sequence: Synthetic oligonucleotide"
  source: /note="Description of Combined DNA/RNA Molecule: Synthetic oligonucleotide"
cuucugucagcauuuauggga

SEQ ID NO: 2366 - DNA, 21 bp, Artificial Sequence
  source: /note="Description of Artificial Sequence: Synthetic oligonucleotide"
  source: /note="Description of Combined DNA/RNA Molecule: Synthetic oligonucleotide"
ucugucagcatuuaugggaua

SEQ ID NO: 2367 - DNA, 21 bp, Artificial Sequence
  source: /note="Description of Artificial Sequence: Synthetic oligonucleotide"
  source: /note="Description of Combined DNA/RNA Molecule: Synthetic oligonucleotide"
cugucagcautuaugggauga

SEQ ID NO: 2368 - DNA, 21 bp, Artificial Sequence
  source: /note="Description of Artificial Sequence: Synthetic oligonucleotide"
  source: /note="Description of Combined DNA/RNA Molecule: Synthetic oligonucleotide"
cauuuaugggauguuuaauga

SEQ ID NO: 2369 - DNA, 21 bp, Artificial Sequence
  source: /note="Description of Artificial Sequence: Synthetic oligonucleotide"
  source: /note="Description of Combined DNA/RNA Molecule: Synthetic oligonucleotide"
auuuaugggatguuuaaugaa

SEQ ID NO: 2370 - DNA, 21 bp, Artificial Sequence
  source: /note="Description of Artificial Sequence: Synthetic oligonucleotide"
  source: /note="Description of Combined DNA/RNA Molecule: Synthetic oligonucleotide"
uuuaugggauguuuaaugaca

SEQ ID NO: 2371 - DNA, 21 bp, Artificial Sequence
  source: /note="Description of Artificial Sequence: Synthetic oligonucleotide"
  source: /note="Description of Combined DNA/RNA Molecule: Synthetic oligonucleotide"
gauguuuaaugacauaguuca

SEQ ID NO: 2372 - DNA, 21 bp, Artificial Sequence
  source: /note="Description of Artificial Sequence: Synthetic oligonucleotide"
  source: /note="Description of Combined DNA/RNA Molecule: Synthetic oligonucleotide"
ugacauagtucaaguuuucua

SEQ ID NO: 2373 - DNA, 21 bp, Artificial Sequence
  source: /note="Description of Artificial Sequence: Synthetic oligonucleotide"
  source: /note="Description of Combined DNA/RNA Molecule: Synthetic oligonucleotide"
gacauagutcaaguuuucuua

SEQ ID NO: 2374 - DNA, 21 bp, Artificial Sequence
  source: /note="Description of Artificial Sequence: Synthetic oligonucleotide"
  source: /note="Description of Combined DNA/RNA Molecule: Synthetic oligonucleotide"
acauaguucaaguuuucuuga

SEQ ID NO: 2375 - DNA, 21 bp, Artificial Sequence
  source: /note="Description of Artificial Sequence: Synthetic oligonucleotide"
  source: /note="Description of Combined DNA/RNA Molecule: Synthetic oligonucleotide"
cauaguucaaguuuucuugua

SEQ ID NO: 2376 - DNA, 21 bp, Artificial Sequence
  source: /note="Description of Artificial Sequence: Synthetic oligonucleotide"
  source: /note="Description of Combined DNA/RNA Molecule: Synthetic oligonucleotide"
auaguucaagtuuucuuguga

SEQ ID NO: 2377 - DNA, 21 bp, Artificial Sequence
  source: /note="Description of Artificial Sequence: Synthetic oligonucleotide"
  source: /note="Description of Combined DNA/RNA Molecule: Synthetic oligonucleotide"
uaguucaagutuucuugugaa

SEQ ID NO: 2378 - DNA, 21 bp, Artificial Sequence
  source: /note="Description of Artificial Sequence: Synthetic oligonucleotide"
  source: /note="Description of Combined DNA/RNA Molecule: Synthetic oligonucleotide"
aguucaagtutucuugugaua

SEQ ID NO: 2379 - DNA, 21 bp, Artificial Sequence
  source: /note="Description of Artificial Sequence: Synthetic oligonucleotide"
  source: /note="Description of Combined DNA/RNA Molecule: Synthetic oligonucleotide"
ucaaguuutctugugauuuga

SEQ ID NO: 2380 - DNA, 21 bp, Artificial Sequence
  source: /note="Description of Artificial Sequence: Synthetic oligonucleotide"
  source: /note="Description of Combined DNA/RNA Molecule: Synthetic oligonucleotide"
gaaaaccatugcucuugcaua

SEQ ID NO: 2381 - DNA, 21 bp, Artificial Sequence
  source: /note="Description of Artificial Sequence: Synthetic oligonucleotide"
  source: /note="Description of Combined DNA/RNA Molecule: Synthetic oligonucleotide"
aaaaccautgcucuugcauga

SEQ ID NO: 2382 - DNA, 21 bp, Artificial Sequence
  source: /note="Description of Artificial Sequence: Synthetic oligonucleotide"
  source: /note="Description of Combined DNA/RNA Molecule: Synthetic oligonucleotide"
auugcucutgcauguuacaua

SEQ ID NO: 2383 - DNA, 21 bp, Artificial Sequence
  source: /note="Description of Artificial Sequence: Synthetic oligonucleotide"
  source: /note="Description of Combined DNA/RNA Molecule: Synthetic oligonucleotide"
uugcucuugcauguuacauga

SEQ ID NO: 2384 - DNA, 21 bp, Artificial Sequence
  source: /note="Description of Artificial Sequence: Synthetic oligonucleotide"
  source: /note="Description of Combined DNA/RNA Molecule: Synthetic oligonucleotide"
cucuugcatgtuacaugguua

SEQ ID NO: 2385 - DNA, 21 bp, Artificial Sequence
  source: /note="Description of Artificial Sequence: Synthetic oligonucleotide"
  source: /note="Description of Combined DNA/RNA Molecule: Synthetic oligonucleotide"
ucuugcaugutacaugguuaa

SEQ ID NO: 2386 - DNA, 21 bp, Artificial Sequence
  source: /note="Description of Artificial Sequence: Synthetic oligonucleotide"
  source: /note="Description of Combined DNA/RNA Molecule: Synthetic oligonucleotide"
aaaagcauaacuucuaaagga

SEQ ID NO: 2387 - DNA, 21 bp, Artificial Sequence
  source: /note="Description of Artificial Sequence: Synthetic oligonucleotide"
  source: /note="Description of Combined DNA/RNA Molecule: Synthetic oligonucleotide"
aaagcauaactucuaaaggaa

SEQ ID NO: 2388 - DNA, 21 bp, Artificial Sequence
  source: /note="Description of Artificial Sequence: Synthetic oligonucleotide"
  source: /note="Description of Combined DNA/RNA Molecule: Synthetic oligonucleotide"
ucuaaaggaagcagaauagca

SEQ ID NO: 2389 - DNA, 21 bp, Artificial Sequence
  source: /note="Description of Artificial Sequence: Synthetic oligonucleotide"
  source: /note="Description of Combined DNA/RNA Molecule: Synthetic oligonucleotide"
cuaaaggaagcagaauagcua

SEQ ID NO: 2390 - DNA, 21 bp, Artificial Sequence
  source: /note="Description of Artificial Sequence: Synthetic oligonucleotide"
  source: /note="Description of Combined DNA/RNA Molecule: Synthetic oligonucleotide"
aaguaagatgcauuuacuaca

SEQ ID NO: 2391 - DNA, 21 bp, Artificial Sequence
  source: /note="Description of Artificial Sequence: Synthetic oligonucleotide"
  source: /note="Description of Combined DNA/RNA Molecule: Synthetic oligonucleotide"
guuggcuucuaaugcuucaga

SEQ ID NO: 2392 - DNA, 21 bp, Artificial Sequence
  source: /note="Description of Artificial Sequence: Synthetic oligonucleotide"
  source: /note="Description of Combined DNA/RNA Molecule: Synthetic oligonucleotide"
ucuaaugctucagauagaaua

SEQ ID NO: 2393 - DNA, 21 bp, Artificial Sequence
  source: /note="Description of Artificial Sequence: Synthetic oligonucleotide"
  source: /note="Description of Combined DNA/RNA Molecule: Synthetic oligonucleotide"
augcuucagatagaauacaga

SEQ ID NO: 2394 - DNA, 21 bp, Artificial Sequence
  source: /note="Description of Artificial Sequence: Synthetic oligonucleotide"
  source: /note="Description of Combined DNA/RNA Molecule: Synthetic oligonucleotide"
cuucagauagaauacaguuga

SEQ ID NO: 2395 - DNA, 23 bp, Artificial Sequence
  source: /note="Description of Artificial Sequence: Synthetic oligonucleotide"
  source: /note="Description of Combined DNA/RNA Molecule: Synthetic oligonucleotide"
utggaaagcuctgcugugcugag

SEQ ID NO: 2396 - DNA, 23 bp, Artificial Sequence
  source: /note="Description of Artificial Sequence: Synthetic oligonucleotide"
  source: /note="Description of Combined DNA/RNA Molecule: Synthetic oligonucleotide"
ucuggaaagcucugcugugcuga

SEQ ID NO: 2397 - DNA, 23 bp, Artificial Sequence
  source: /note="Description of Artificial Sequence: Synthetic oligonucleotide"
  source: /note="Description of Combined DNA/RNA Molecule: Synthetic oligonucleotide"
ucaacgtgcacagaagaaccuca

SEQ ID NO: 2398 - DNA, 23 bp, Artificial Sequence
  source: /note="Description of Artificial Sequence: Synthetic oligonucleotide"
  source: /note="Description of Combined DNA/RNA Molecule: Synthetic oligonucleotide"
ugcaacgugcacagaagaaccuc

SEQ ID NO: 2399 - DNA, 23 bp, Artificial Sequence
  source: /note="Description of Artificial Sequence: Synthetic oligonucleotide"
  source: /note="Description of Combined DNA/RNA Molecule: Synthetic oligonucleotide"
ucuggatucautgggacuggcca

SEQ ID NO: 2400 - DNA, 23 bp, Artificial Sequence
  source: /note="Description of Artificial Sequence: Synthetic oligonucleotide"
  source: /note="Description of Combined DNA/RNA Molecule: Synthetic oligonucleotide"
ucagaacugactugucucggagg

SEQ ID NO: 2401 - DNA, 23 bp, Artificial Sequence
  source: /note="Description of Artificial Sequence: Synthetic oligonucleotide"
  source: /note="Description of Combined DNA/RNA Molecule: Synthetic oligonucleotide"
uccagaacugacutgucucggag

SEQ ID NO: 2402 - DNA, 23 bp, Artificial Sequence
  source: /note="Description of Artificial Sequence: Synthetic oligonucleotide"
  source: /note="Description of Combined DNA/RNA Molecule: Synthetic oligonucleotide"
utagaaacuuctctggagccugg

SEQ ID NO: 2403 - DNA, 23 bp, Artificial Sequence
  source: /note="Description of Artificial Sequence: Synthetic oligonucleotide"
  source: /note="Description of Combined DNA/RNA Molecule: Synthetic oligonucleotide"
uguagaaacuucucuggagccug

SEQ ID NO: 2404 - DNA, 23 bp, Artificial Sequence
  source: /note="Description of Artificial Sequence: Synthetic oligonucleotide"
  source: /note="Description of Combined DNA/RNA Molecule: Synthetic oligonucleotide"
uccaaaguguccaaauuccacgu

SEQ ID NO: 2405 - DNA, 23 bp, Artificial Sequence
  source: /note="Description of Artificial Sequence: Synthetic oligonucleotide"
  source: /note="Description of Combined DNA/RNA Molecule: Synthetic oligonucleotide"
ugccaaaguguccaaauuccacg

SEQ ID NO: 2406 - DNA, 23 bp, Artificial Sequence
  source: /note="Description of Artificial Sequence: Synthetic oligonucleotide"
  source: /note="Description of Combined DNA/RNA Molecule: Synthetic oligonucleotide"
uggccaaagugtccaaauuccac

SEQ ID NO: 2407 - DNA, 23 bp, Artificial Sequence
  source: /note="Description of Artificial Sequence: Synthetic oligonucleotide"
  source: /note="Description of Combined DNA/RNA Molecule: Synthetic oligonucleotide"
uaggccaaaguguccaaauucca

SEQ ID NO: 2408 - DNA, 23 bp, Artificial Sequence
  source: /note="Description of Artificial Sequence: Synthetic oligonucleotide"
  source: /note="Description of Combined DNA/RNA Molecule: Synthetic oligonucleotide"
uccuggaaggccaaaguguccaa

SEQ ID NO: 2409 - DNA, 23 bp, Artificial Sequence
  source: /note="Description of Artificial Sequence: Synthetic oligonucleotide"
  source: /note="Description of Combined DNA/RNA Molecule: Synthetic oligonucleotide"
ucucggacuucagtuccuggaag

SEQ ID NO: 2410 - DNA, 23 bp, Artificial Sequence
  source: /note="Description of Artificial Sequence: Synthetic oligonucleotide"
  source: /note="Description of Combined DNA/RNA Molecule: Synthetic oligonucleotide"
ucagtuagcucggacuucaguuc

SEQ ID NO: 2411 - DNA, 23 bp, Artificial Sequence
  source: /note="Description of Artificial Sequence: Synthetic oligonucleotide"
  source: /note="Description of Combined DNA/RNA Molecule: Synthetic oligonucleotide"
ucaggaacuucagtuagcucgga

SEQ ID NO: 2412 - DNA, 23 bp, Artificial Sequence
  source: /note="Description of Artificial Sequence: Synthetic oligonucleotide"
  source: /note="Description of Combined DNA/RNA Molecule: Synthetic oligonucleotide"
ucgggaagcaggaacuucaguua

SEQ ID NO: 2413 - DNA, 23 bp, Artificial Sequence
  source: /note="Description of Artificial Sequence: Synthetic oligonucleotide"
  source: /note="Description of Combined DNA/RNA Molecule: Synthetic oligonucleotide"
uaaaautcgggaagcaggaacuu

SEQ ID NO: 2414 - DNA, 23 bp, Artificial Sequence
  source: /note="Description of Artificial Sequence: Synthetic oligonucleotide"
  source: /note="Description of Combined DNA/RNA Molecule: Synthetic oligonucleotide"
utcaaaauucgggaagcaggaac

SEQ ID NO: 2415 - DNA, 23 bp, Artificial Sequence
  source: /note="Description of Artificial Sequence: Synthetic oligonucleotide"
  source: /note="Description of Combined DNA/RNA Molecule: Synthetic oligonucleotide"
utucaaaauucgggaagcaggaa

SEQ ID NO: 2416 - DNA, 23 bp, Artificial Sequence
  source: /note="Description of Artificial Sequence: Synthetic oligonucleotide"
  source: /note="Description of Combined DNA/RNA Molecule: Synthetic oligonucleotide"
ucuucaaaauucgggaagcagga

SEQ ID NO: 2417 - DNA, 23 bp, Artificial Sequence
  source: /note="Description of Artificial Sequence: Synthetic oligonucleotide"
  source: /note="Description of Combined DNA/RNA Molecule: Synthetic oligonucleotide"
uccutcaaaautcgggaagcagg

SEQ ID NO: 2418 - DNA, 23 bp, Artificial Sequence
  source: /note="Description of Artificial Sequence: Synthetic oligonucleotide"
  source: /note="Description of Combined DNA/RNA Molecule: Synthetic oligonucleotide"
ucuccutcaaaautcgggaagca

SEQ ID NO: 2419 - DNA, 23 bp, Artificial Sequence
  source: /note="Description of Artificial Sequence: Synthetic oligonucleotide"
  source: /note="Description of Combined DNA/RNA Molecule: Synthetic oligonucleotide"
uccaaacuagutctccacauccg

SEQ ID NO: 2420 - DNA, 23 bp, Artificial Sequence
  source: /note="Description of Artificial Sequence: Synthetic oligonucleotide"
  source: /note="Description of Combined DNA/RNA Molecule: Synthetic oligonucleotide"
ucccaaacuagtucuccacaucc

SEQ ID NO: 2421 - DNA, 23 bp, Artificial Sequence
  source: /note="Description of Artificial Sequence: Synthetic oligonucleotide"
  source: /note="Description of Combined DNA/RNA Molecule: Synthetic oligonucleotide"
uacccaaacuagutcuccacauc

SEQ ID NO: 2422 - DNA, 23 bp, Artificial Sequence
  source: /note="Description of Artificial Sequence: Synthetic oligonucleotide"
  source: /note="Description of Combined DNA/RNA Molecule: Synthetic oligonucleotide"
ucuacccaaactaguucuccaca

SEQ ID NO: 2423 - DNA, 23 bp, Artificial Sequence
  source: /note="Description of Artificial Sequence: Synthetic oligonucleotide"
  source: /note="Description of Combined DNA/RNA Molecule: Synthetic oligonucleotide"
uccuacccaaacuaguucuccac

SEQ ID NO: 2424 - DNA, 23 bp, Artificial Sequence
  source: /note="Description of Artificial Sequence: Synthetic oligonucleotide"
  source: /note="Description of Combined DNA/RNA Molecule: Synthetic oligonucleotide"
ucuccuacccaaacuaguucucc

SEQ ID NO: 2425 - DNA, 23 bp, Artificial Sequence
  source: /note="Description of Artificial Sequence: Synthetic oligonucleotide"
  source: /note="Description of Combined DNA/RNA Molecule: Synthetic oligonucleotide"
ucagtaauugutucugcuguucu

SEQ ID NO: 2426 - DNA, 23 bp, Artificial Sequence
  source: /note="Description of Artificial Sequence: Synthetic oligonucleotide"
  source: /note="Description of Combined DNA/RNA Molecule: Synthetic oligonucleotide"
uccaguaauugtutcugcuguuc

SEQ ID NO: 2427 - DNA, 23 bp, Artificial Sequence
  source: /note="Description of Artificial Sequence: Synthetic oligonucleotide"
  source: /note="Description of Combined DNA/RNA Molecule: Synthetic oligonucleotide"
ucauactugccagtaauuguuuc

SEQ ID NO: 2428 - DNA, 23 bp, Artificial Sequence
  source: /note="Description of Artificial Sequence: Synthetic oligonucleotide"
  source: /note="Description of Combined DNA/RNA Molecule: Synthetic oligonucleotide"
uccatacuugccaguaauuguuu

SEQ ID NO: 2429 - DNA, 23 bp, Artificial Sequence
  source: /note="Description of Artificial Sequence: Synthetic oligonucleotide"
  source: /note="Description of Combined DNA/RNA Molecule: Synthetic oligonucleotide"
uaccauacuugccaguaauuguu

SEQ ID NO: 2430 - DNA, 23 bp, Artificial Sequence
  source: /note="Description of Artificial Sequence: Synthetic oligonucleotide"
  source: /note="Description of Combined DNA/RNA Molecule: Synthetic oligonucleotide"
ucaccatacuugccaguaauugu

SEQ ID NO: 2431 - DNA, 23 bp, Artificial Sequence
  source: /note="Description of Artificial Sequence: Synthetic oligonucleotide"
  source: /note="Description of Combined DNA/RNA Molecule: Synthetic oligonucleotide"
uacaccauacutgccaguaauug

SEQ ID NO: 2432 - DNA, 23 bp, Artificial Sequence
  source: /note="Description of Artificial Sequence: Synthetic oligonucleotide"
  source: /note="Description of Combined DNA/RNA Molecule: Synthetic oligonucleotide"
ucacaccauactugccaguaauu

SEQ ID NO: 2433 - DNA, 23 bp, Artificial Sequence
  source: /note="Description of Artificial Sequence: Synthetic oligonucleotide"
  source: /note="Description of Combined DNA/RNA Molecule: Synthetic oligonucleotide"
ucucgcauccacacaccauacuu

SEQ ID NO: 2434 - DNA, 23 bp, Artificial Sequence
  source: /note="Description of Artificial Sequence: Synthetic oligonucleotide"
  source: /note="Description of Combined DNA/RNA Molecule: Synthetic oligonucleotide"
utcaaaaaccuggcggacauccg

SEQ ID NO: 2435 - DNA, 23 bp, Artificial Sequence
  source: /note="Description of Artificial Sequence: Synthetic oligonucleotide"
  source: /note="Description of Combined DNA/RNA Molecule: Synthetic oligonucleotide"
ucugaugaggucatacucaaaaa

SEQ ID NO: 2436 - DNA, 23 bp, Artificial Sequence
  source: /note="Description of Artificial Sequence: Synthetic oligonucleotide"
  source: /note="Description of Combined DNA/RNA Molecule: Synthetic oligonucleotide"
ucauaaacuggcugaugagguca

SEQ ID NO: 2437 - DNA, 23 bp, Artificial Sequence
  source: /note="Description of Artificial Sequence: Synthetic oligonucleotide"
  source: /note="Description of Combined DNA/RNA Molecule: Synthetic oligonucleotide"
ugcataaacuggctgaugagguc

SEQ ID NO: 2438 - DNA, 23 bp, Artificial Sequence
  source: /note="Description of Artificial Sequence: Synthetic oligonucleotide"
  source: /note="Description of Combined DNA/RNA Molecule: Synthetic oligonucleotide"
ucugcataaactggcugaugagg

SEQ ID NO: 2439 - DNA, 23 bp, Artificial Sequence
  source: /note="Description of Artificial Sequence: Synthetic oligonucleotide"
  source: /note="Description of Combined DNA/RNA Molecule: Synthetic oligonucleotide"
uccutagaaggguagcccugcau

SEQ ID NO: 2440 - DNA, 23 bp, Artificial Sequence
  source: /note="Description of Artificial Sequence: Synthetic oligonucleotide"
  source: /note="Description of Combined DNA/RNA Molecule: Synthetic oligonucleotide"
uacctuagaagggtagcccugca

SEQ ID NO: 2441 - DNA, 23 bp, Artificial Sequence
  source: /note="Description of Artificial Sequence: Synthetic oligonucleotide"
  source: /note="Description of Combined DNA/RNA Molecule: Synthetic oligonucleotide"
ugaacctuagaaggguagcccug

SEQ ID NO: 2442 - DNA, 23 bp, Artificial Sequence
  source: /note="Description of Artificial Sequence: Synthetic oligonucleotide"
  source: /note="Description of Combined DNA/RNA Molecule: Synthetic oligonucleotide"
ucagtatgugaaccuuagaaggg

SEQ ID NO: 2443 - DNA, 23 bp, Artificial Sequence
  source: /note="Description of Artificial Sequence: Synthetic oligonucleotide"
  source: /note="Description of Combined DNA/RNA Molecule: Synthetic oligonucleotide"
ugcaguaugugaaccuuagaagg

SEQ ID NO: 2444 - DNA, 23 bp, Artificial Sequence
  source: /note="Description of Artificial Sequence: Synthetic oligonucleotide"
  source: /note="Description of Combined DNA/RNA Molecule: Synthetic oligonucleotide"
uauctuaugacagtucuggacuc

SEQ ID NO: 2445 - DNA, 23 bp, Artificial Sequence
  source: /note="Description of Artificial Sequence: Synthetic oligonucleotide"
  source: /note="Description of Combined DNA/RNA Molecule: Synthetic oligonucleotide"
ucauaucuuaugacaguucugga

SEQ ID NO: 2446 - DNA, 23 bp, Artificial Sequence
  source: /note="Description of Artificial Sequence: Synthetic oligonucleotide"
  source: /note="Description of Combined DNA/RNA Molecule: Synthetic oligonucleotide"
utcatatcuuatgacaguucugg

SEQ ID NO: 2447 - DNA, 23 bp, Artificial Sequence
  source: /note="Description of Artificial Sequence: Synthetic oligonucleotide"
  source: /note="Description of Combined DNA/RNA Molecule: Synthetic oligonucleotide"
ucucauaucuuaugacaguucug

SEQ ID NO: 2448 - DNA, 23 bp, Artificial Sequence
  source: /note="Description of Artificial Sequence: Synthetic oligonucleotide"
  source: /note="Description of Combined DNA/RNA Molecule: Synthetic oligonucleotide"
ugcucataucutatgacaguucu

SEQ ID NO: 2449 - DNA, 23 bp, Artificial Sequence
  source: /note="Description of Artificial Sequence: Synthetic oligonucleotide"
  source: /note="Description of Combined DNA/RNA Molecule: Synthetic oligonucleotide"
ucggtatucagcucauaucuuau

SEQ ID NO: 2450 - DNA, 23 bp, Artificial Sequence
  source: /note="Description of Artificial Sequence: Synthetic oligonucleotide"
  source: /note="Description of Combined DNA/RNA Molecule: Synthetic oligonucleotide"
utcgguauucagctcauaucuua

SEQ ID NO: 2451 - DNA, 23 bp, Artificial Sequence
  source: /note="Description of Artificial Sequence: Synthetic oligonucleotide"
  source: /note="Description of Combined DNA/RNA Molecule: Synthetic oligonucleotide"
ucucggtauucagcucauaucuu

SEQ ID NO: 2452 - DNA, 23 bp, Artificial Sequence
  source: /note="Description of Artificial Sequence: Synthetic oligonucleotide"
  source: /note="Description of Combined DNA/RNA Molecule: Synthetic oligonucleotide"
ucuucacuguctcgguauucagc

SEQ ID NO: 2453 - DNA, 23 bp, Artificial Sequence
  source: /note="Description of Artificial Sequence: Synthetic oligonucleotide"
  source: /note="Description of Combined DNA/RNA Molecule: Synthetic oligonucleotide"
uccutcacugucucgguauucag

SEQ ID NO: 2454 - DNA, 23 bp, Artificial Sequence
  source: /note="Description of Artificial Sequence: Synthetic oligonucleotide"
  source: /note="Description of Combined DNA/RNA Molecule: Synthetic oligonucleotide"
uauacgggaactgtccgugguag

SEQ ID NO: 2455 - DNA, 23 bp, Artificial Sequence
  source: /note="Description of Artificial Sequence: Synthetic oligonucleotide"
  source: /note="Description of Combined DNA/RNA Molecule: Synthetic oligonucleotide"
uaagaatacgggaacuguccgug

SEQ ID NO: 2456 - DNA, 23 bp, Artificial Sequence
  source: /note="Description of Artificial Sequence: Synthetic oligonucleotide"
  source: /note="Description of Combined DNA/RNA Molecule: Synthetic oligonucleotide"
ucaagaauacgggaacuguccgu

SEQ ID NO: 2457 - DNA, 23 bp, Artificial Sequence
  source: /note="Description of Artificial Sequence: Synthetic oligonucleotide"
  source: /note="Description of Combined DNA/RNA Molecule: Synthetic oligonucleotide"
uccaagaauacgggaacuguccg

SEQ ID NO: 2458 - DNA, 23 bp, Artificial Sequence
  source: /note="Description of Artificial Sequence: Synthetic oligonucleotide"
  source: /note="Description of Combined DNA/RNA Molecule: Synthetic oligonucleotide"
uguaaatgacccagaggccugcu

SEQ ID NO: 2459 - DNA, 23 bp, Artificial Sequence
  source: /note="Description of Artificial Sequence: Synthetic oligonucleotide"
  source: /note="Description of Combined DNA/RNA Molecule: Synthetic oligonucleotide"
utguaaaugacccagaggccugc

SEQ ID NO: 2460 - DNA, 23 bp, Artificial Sequence
  source: /note="Description of Artificial Sequence: Synthetic oligonucleotide"
  source: /note="Description of Combined DNA/RNA Molecule: Synthetic oligonucleotide"
ucugtaaaugacccagaggccug

SEQ ID NO: 2461 - DNA, 23 bp, Artificial Sequence
  source: /note="Description of Artificial Sequence: Synthetic oligonucleotide"
  source: /note="Description of Combined DNA/RNA Molecule: Synthetic oligonucleotide"
ugacaatggcacctuuggccuca

SEQ ID NO: 2462 - DNA, 23 bp, Artificial Sequence
  source: /note="Description of Artificial Sequence: Synthetic oligonucleotide"
  source: /note="Description of Combined DNA/RNA Molecule: Synthetic oligonucleotide"
ucagtutggagaggacaauggca

SEQ ID NO: 2463 - DNA, 23 bp, Artificial Sequence
  source: /note="Description of Artificial Sequence: Synthetic oligonucleotide"
  source: /note="Description of Combined DNA/RNA Molecule: Synthetic oligonucleotide"
uaugaugaaggcatuggcgacug

SEQ ID NO: 2464 - DNA, 23 bp, Artificial Sequence
  source: /note="Description of Artificial Sequence: Synthetic oligonucleotide"
  source: /note="Description of Combined DNA/RNA Molecule: Synthetic oligonucleotide"
ucauaagcaaagutgacgguagc

SEQ ID NO: 2465 - DNA, 23 bp, Artificial Sequence
  source: /note="Description of Artificial Sequence: Synthetic oligonucleotide"
  source: /note="Description of Combined DNA/RNA Molecule: Synthetic oligonucleotide"
utcataagcaaagtugacgguag

SEQ ID NO: 2466 - DNA, 23 bp, Artificial Sequence
  source: /note="Description of Artificial Sequence: Synthetic oligonucleotide"
  source: /note="Description of Combined DNA/RNA Molecule: Synthetic oligonucleotide"
ugucauaagcaaaguugacggua

SEQ ID NO: 2467 - DNA, 23 bp, Artificial Sequence
  source: /note="Description of Artificial Sequence: Synthetic oligonucleotide"
  source: /note="Description of Combined DNA/RNA Molecule: Synthetic oligonucleotide"
uauacctgugccugugucauaag

SEQ ID NO: 2468 - DNA, 23 bp, Artificial Sequence
  source: /note="Description of Artificial Sequence: Synthetic oligonucleotide"
  source: /note="Description of Combined DNA/RNA Molecule: Synthetic oligonucleotide"
utugaatgggatggucagggucu

SEQ ID NO: 2469 - DNA, 23 bp, Artificial Sequence
  source: /note="Description of Artificial Sequence: Synthetic oligonucleotide"
  source: /note="Description of Combined DNA/RNA Molecule: Synthetic oligonucleotide"
ucuugaaugggauggucaggguc

SEQ ID NO: 2470 - DNA, 23 bp, Artificial Sequence
  source: /note="Description of Artificial Sequence: Synthetic oligonucleotide"
  source: /note="Description of Combined DNA/RNA Molecule: Synthetic oligonucleotide"
ucggtucuugaaugggaugguca

SEQ ID NO: 2471 - DNA, 23 bp, Artificial Sequence
  source: /note="Description of Artificial Sequence: Synthetic oligonucleotide"
  source: /note="Description of Combined DNA/RNA Molecule: Synthetic oligonucleotide"
ugcggutcuugaatgggaugguc

SEQ ID NO: 2472 - DNA, 23 bp, Artificial Sequence
  source: /note="Description of Artificial Sequence: Synthetic oligonucleotide"
  source: /note="Description of Combined DNA/RNA Molecule: Synthetic oligonucleotide"
ucaatcaugcugctguacuuaua

SEQ ID NO: 2473 - DNA, 23 bp, Artificial Sequence
  source: /note="Description of Artificial Sequence: Synthetic oligonucleotide"
  source: /note="Description of Combined DNA/RNA Molecule: Synthetic oligonucleotide"
utcaaucaugctgcuguacuuau

SEQ ID NO: 2474 - DNA, 23 bp, Artificial Sequence
  source: /note="Description of Artificial Sequence: Synthetic oligonucleotide"
  source: /note="Description of Combined DNA/RNA Molecule: Synthetic oligonucleotide"
uagucaaucaugctgcuguacuu

SEQ ID NO: 2475 - DNA, 23 bp, Artificial Sequence
  source: /note="Description of Artificial Sequence: Synthetic oligonucleotide"
  source: /note="Description of Combined DNA/RNA Molecule: Synthetic oligonucleotide"
ucaagutgucccaggcaaagagc

SEQ ID NO: 2476 - DNA, 23 bp, Artificial Sequence
  source: /note="Description of Artificial Sequence: Synthetic oligonucleotide"
  source: /note="Description of Combined DNA/RNA Molecule: Synthetic oligonucleotide"
ugucauaagugaccauguucaag

SEQ ID NO: 2477 - DNA, 23 bp, Artificial Sequence
  source: /note="Description of Artificial Sequence: Synthetic oligonucleotide"
  source: /note="Description of Combined DNA/RNA Molecule: Synthetic oligonucleotide"
ucacaucuuggagagcuugaugu

SEQ ID NO: 2478 - DNA, 23 bp, Artificial Sequence
  source: /note="Description of Artificial Sequence: Synthetic oligonucleotide"
  source: /note="Description of Combined DNA/RNA Molecule: Synthetic oligonucleotide"
utcacatcuuggagagcuugaug

SEQ ID NO: 2479 - DNA, 23 bp, Artificial Sequence
  source: /note="Description of Artificial Sequence: Synthetic oligonucleotide"
  source: /note="Description of Combined DNA/RNA Molecule: Synthetic oligonucleotide"
ucucagacuacaatuccugaaua

SEQ ID NO: 2480 - DNA, 23 bp, Artificial Sequence
  source: /note="Description of Artificial Sequence: Synthetic oligonucleotide"
  source: /note="Description of Combined DNA/RNA Molecule: Synthetic oligonucleotide"
uauaaatgcugacagaagauaaa

SEQ ID NO: 2481 - DNA, 23 bp, Artificial Sequence
  source: /note="Description of Artificial Sequence: Synthetic oligonucleotide"
  source: /note="Description of Combined DNA/RNA Molecule: Synthetic oligonucleotide"
ucauaaaugcugacagaagauaa

SEQ ID NO: 2482 - DNA, 23 bp, Artificial Sequence
  source: /note="Description of Artificial Sequence: Synthetic oligonucleotide"
  source: /note="Description of Combined DNA/RNA Molecule: Synthetic oligonucleotide"
uccataaaugctgacagaagaua

SEQ ID NO: 2483 - DNA, 23 bp, Artificial Sequence
  source: /note="Description of Artificial Sequence: Synthetic oligonucleotide"
  source: /note="Description of Combined DNA/RNA Molecule: Synthetic oligonucleotide"
ucccauaaaugcugacagaagau

SEQ ID NO: 2484 - DNA, 23 bp, Artificial Sequence
  source: /note="Description of Artificial Sequence: Synthetic oligonucleotide"
  source: /note="Description of Combined DNA/RNA Molecule: Synthetic oligonucleotide"
uaucccauaaatgcugacagaag

SEQ ID NO: 2485 - DNA, 23 bp, Artificial Sequence
  source: /note="Description of Artificial Sequence: Synthetic oligonucleotide"
  source: /note="Description of Combined DNA/RNA Molecule: Synthetic oligonucleotide"
ucaucccauaaaugcugacagaa

SEQ ID NO: 2486 - DNA, 23 bp, Artificial Sequence
  source: /note="Description of Artificial Sequence: Synthetic oligonucleotide"
  source: /note="Description of Combined DNA/RNA Molecule: Synthetic oligonucleotide"
ucautaaacaucccauaaaugcu

SEQ ID NO: 2487 - DNA, 23 bp, Artificial Sequence
  source: /note="Description of Artificial Sequence: Synthetic oligonucleotide"
  source: /note="Description of Combined DNA/RNA Molecule: Synthetic oligonucleotide"
utcatuaaacatcccauaaaugc

SEQ ID NO: 2488 - DNA, 23 bp, Artificial Sequence
  source: /note="Description of Artificial Sequence: Synthetic oligonucleotide"
  source: /note="Description of Combined DNA/RNA Molecule: Synthetic oligonucleotide"
ugucautaaacaucccauaaaug

SEQ ID NO: 2489 - DNA, 23 bp, Artificial Sequence
  source: /note="Description of Artificial Sequence: Synthetic oligonucleotide"
  source: /note="Description of Combined DNA/RNA Molecule: Synthetic oligonucleotide"
ugaacuaugucautaaacauccc

SEQ ID NO: 2490 - DNA, 23 bp, Artificial Sequence
  source: /note="Description of Artificial Sequence: Synthetic oligonucleotide"
  source: /note="Description of Combined DNA/RNA Molecule: Synthetic oligonucleotide"
uagaaaacuugaacuaugucauu

SEQ ID NO: 2491 - DNA, 23 bp, Artificial Sequence
  source: /note="Description of Artificial Sequence: Synthetic oligonucleotide"
  source: /note="Description of Combined DNA/RNA Molecule: Synthetic oligonucleotide"
uaagaaaacuugaacuaugucau

SEQ ID NO: 2492 - DNA, 23 bp, Artificial Sequence
  source: /note="Description of Artificial Sequence: Synthetic oligonucleotide"
  source: /note="Description of Combined DNA/RNA Molecule: Synthetic oligonucleotide"
ucaagaaaacutgaacuauguca

SEQ ID NO: 2493 - DNA, 23 bp, Artificial Sequence
  source: /note="Description of Artificial Sequence: Synthetic oligonucleotide"
  source: /note="Description of Combined DNA/RNA Molecule: Synthetic oligonucleotide"
uacaagaaaactugaacuauguc

SEQ ID NO: 2494 - DNA, 23 bp, Artificial Sequence
  source: /note="Description of Artificial Sequence: Synthetic oligonucleotide"
  source: /note="Description of Combined DNA/RNA Molecule: Synthetic oligonucleotide"
ucacaagaaaacutgaacuaugu

SEQ ID NO: 2495 - DNA, 23 bp, Artificial Sequence
  source: /note="Description of Artificial Sequence: Synthetic oligonucleotide"
  source: /note="Description of Combined DNA/RNA Molecule: Synthetic oligonucleotide"
utcacaagaaaactugaacuaug

SEQ ID NO: 2496 - DNA, 23 bp, Artificial Sequence
  source: /note="Description of Artificial Sequence: Synthetic oligonucleotide"
  source: /note="Description of Combined DNA/RNA Molecule: Synthetic oligonucleotide"
uaucacaagaaaacuugaacuau

SEQ ID NO: 2497 - DNA, 23 bp, Artificial Sequence
  source: /note="Description of Artificial Sequence: Synthetic oligonucleotide"
  source: /note="Description of Combined DNA/RNA Molecule: Synthetic oligonucleotide"
ucaaaucacaagaaaacuugaac

SEQ ID NO: 2498 - DNA, 23 bp, Artificial Sequence
  source: /note="Description of Artificial Sequence: Synthetic oligonucleotide"
  source: /note="Description of Combined DNA/RNA Molecule: Synthetic oligonucleotide"
uaugcaagagcaatgguuuucag

SEQ ID NO: 2499 - DNA, 23 bp, Artificial Sequence
  source: /note="Description of Artificial Sequence: Synthetic oligonucleotide"
  source: /note="Description of Combined DNA/RNA Molecule: Synthetic oligonucleotide"
ucaugcaagagcaaugguuuuca

SEQ ID NO: 2500 - DNA, 23 bp, Artificial Sequence
  source: /note="Description of Artificial Sequence: Synthetic oligonucleotide"
  source: /note="Description of Combined DNA/RNA Molecule: Synthetic oligonucleotide"
uaugtaacaugcaagagcaaugg

SEQ ID NO: 2501 - DNA, 23 bp, Artificial Sequence
  source: /note="Description of Artificial Sequence: Synthetic oligonucleotide"
  source: /note="Description of Combined DNA/RNA Molecule: Synthetic oligonucleotide"
ucauguaacaugcaagagcaaug

SEQ ID NO: 2502 - DNA, 23 bp, Artificial Sequence
  source: /note="Description of Artificial Sequence: Synthetic oligonucleotide"
  source: /note="Description of Combined DNA/RNA Molecule: Synthetic oligonucleotide"
uaaccatguaacatgcaagagca

SEQ ID NO: 2503 - DNA, 23 bp, Artificial Sequence
  source: /note="Description of Artificial Sequence: Synthetic oligonucleotide"
  source: /note="Description of Combined DNA/RNA Molecule: Synthetic oligonucleotide"
utaaccauguaacaugcaagagc

SEQ ID NO: 2504 - DNA, 23 bp, Artificial Sequence
  source: /note="Description of Artificial Sequence: Synthetic oligonucleotide"
  source: /note="Description of Combined DNA/RNA Molecule: Synthetic oligonucleotide"
uccutuagaagtuaugcuuuuua

SEQ ID NO: 2505 - DNA, 23 bp, Artificial Sequence
  source: /note="Description of Artificial Sequence: Synthetic oligonucleotide"
  source: /note="Description of Combined DNA/RNA Molecule: Synthetic oligonucleotide"
utcctutagaagutaugcuuuuu

SEQ ID NO: 2506 - DNA, 23 bp, Artificial Sequence
  source: /note="Description of Artificial Sequence: Synthetic oligonucleotide"
  source: /note="Description of Combined DNA/RNA Molecule: Synthetic oligonucleotide"
ugcuautcugctuccuuuagaag

SEQ ID NO: 2507 - DNA, 23 bp, Artificial Sequence
  source: /note="Description of Artificial Sequence: Synthetic oligonucleotide"
  source: /note="Description of Combined DNA/RNA Molecule: Synthetic oligonucleotide"
uagctatucugcutccuuuagaa

SEQ ID NO: 2508 - DNA, 23 bp, Artificial Sequence
  source: /note="Description of Artificial Sequence: Synthetic oligonucleotide"
  source: /note="Description of Combined DNA/RNA Molecule: Synthetic oligonucleotide"
uguaguaaaugcatcuuacuuau

SEQ ID NO: 2509 - DNA, 23 bp, Artificial Sequence
  source: /note="Description of Artificial Sequence: Synthetic oligonucleotide"
  source: /note="Description of Combined DNA/RNA Molecule: Synthetic oligonucleotide"
ucugaagcauuagaagccaacug

SEQ ID NO: 2510 - DNA, 23 bp, Artificial Sequence
  source: /note="Description of Artificial Sequence: Synthetic oligonucleotide"
  source: /note="Description of Combined DNA/RNA Molecule: Synthetic oligonucleotide"
uauucuaucugaagcauuagaag

SEQ ID NO: 2511 - DNA, 23 bp, Artificial Sequence
  source: /note="Description of Artificial Sequence: Synthetic oligonucleotide"
  source: /note="Description of Combined DNA/RNA Molecule: Synthetic oligonucleotide"
ucugtatucuatctgaagcauua

SEQ ID NO: 2512 - DNA, 23 bp, Artificial Sequence
  source: /note="Description of Artificial Sequence: Synthetic oligonucleotide"
  source: /note="Description of Combined DNA/RNA Molecule: Synthetic oligonucleotide"
ucaacuguauucuaucugaagca

SEQ ID NO: 2513 - RNA, 21 nt, Artificial Sequence
  source: /note="Description of Artificial Sequence: Synthetic oligonucleotide"
cagcacagcagagcuuuccaa

SEQ ID NO: 2514 - RNA, 21 nt, Artificial Sequence
  source: /note="Description of Artificial Sequence: Synthetic oligonucleotide"
agcacagcagagcuuuccaga

SEQ ID NO: 2515 - RNA, 21 nt, Artificial Sequence
  source: /note="Description of Artificial Sequence: Synthetic oligonucleotide"
agguucuucugugcacguuga

SEQ ID NO: 2516 - DNA, 21 bp, Artificial Sequence
  source: /note="Description of Artificial Sequence: Synthetic oligonucleotide"
  source: /note="Description of Combined DNA/RNA Molecule: Synthetic oligonucleotide"
gguucuuctgtgcacguugca

SEQ ID NO: 2517 - RNA, 21 nt, Artificial Sequence
  source: /note="Description of Artificial Sequence: Synthetic oligonucleotide"
gccagucccaaugaauccaga

SEQ ID NO: 2518 - RNA, 21 nt, Artificial Sequence
  source: /note="Description of Artificial Sequence: Synthetic oligonucleotide"
uccgagacaagucaguucuga

SEQ ID NO: 2519 - DNA, 21 bp, Artificial Sequence
  source: /note="Description of Artificial Sequence: Synthetic oligonucleotide"
  source: /note="Description of Combined DNA/RNA Molecule: Synthetic oligonucleotide"
ccgagacaagtcaguucugga

SEQ ID NO: 2520 - RNA, 21 nt, Artificial Sequence
  source: /note="Description of Artificial Sequence: Synthetic oligonucleotide"
aggcuccagagaaguuucuaa

SEQ ID NO: 2521 - RNA, 21 nt, Artificial Sequence
  source: /note="Description of Artificial Sequence: Synthetic oligonucleotide"
ggcuccagagaaguuucuaca

SEQ ID NO: 2522 - DNA, 21 bp, Artificial Sequence
  source: /note="Description of Artificial Sequence: Synthetic oligonucleotide"
  source: /note="Description of Combined DNA/RNA Molecule: Synthetic oligonucleotide"
guggaauutggacacuuugga

SEQ ID NO: 2523 - RNA, 21 nt, Artificial Sequence
  source: /note="Description of Artificial Sequence: Synthetic oligonucleotide"
uggaauuuggacacuuuggca

SEQ ID NO: 2524 - RNA, 21 nt, Artificial Sequence
  source: /note="Description of Artificial Sequence: Synthetic oligonucleotide"
ggaauuuggacacuuuggcca

SEQ ID NO: 2525 - RNA, 21 nt, Artificial Sequence
  source: /note="Description of Artificial Sequence: Synthetic oligonucleotide"
gaauuuggacacuuuggccua

SEQ ID NO: 2526 - DNA, 21 bp, Artificial Sequence
  source: /note="Description of Artificial Sequence: Synthetic oligonucleotide"
  source: /note="Description of Combined DNA/RNA Molecule: Synthetic oligonucleotide"
ggacacuutggccuuccagga

SEQ ID NO: 2527 - RNA, 21 nt, Artificial Sequence
  source: /note="Description of Artificial Sequence: Synthetic oligonucleotide"
uccaggaacugaaguccgaga

SEQ ID NO: 2528 - RNA, 21 nt, Artificial Sequence
  source: /note="Description of Artificial Sequence: Synthetic oligonucleotide"
acugaaguccgagcuaacuga

SEQ ID NO: 2529 - RNA, 21 nt, Artificial Sequence
  source: /note="Description of Artificial Sequence: Synthetic oligonucleotide"
cgagcuaacugaaguuccuga

SEQ ID NO: 2530 - DNA, 21 bp, Artificial Sequence
  source: /note="Description of Artificial Sequence: Synthetic oligonucleotide"
  source: /note="Description of Combined DNA/RNA Molecule: Synthetic oligonucleotide"
acugaagutccugcuucccga

SEQ ID NO: 2531 - DNA, 21 bp, Artificial Sequence
  source: /note="Description of Artificial Sequence: Synthetic oligonucleotide"
  source: /note="Description of Combined DNA/RNA Molecule: Synthetic oligonucleotide"
guuccugctucccgaauuuua

SEQ ID NO: 2532 - RNA, 21 nt, Artificial Sequence
  source: /note="Description of Artificial Sequence: Synthetic oligonucleotide"
uccugcuucccgaauuuugaa

SEQ ID NO: 2533 - RNA, 21 nt, Artificial Sequence
  source: /note="Description of Artificial Sequence: Synthetic oligonucleotide"
ccugcuucccgaauuuugaaa

SEQ ID NO: 2534 - RNA, 21 nt, Artificial Sequence
  source: /note="Description of Artificial Sequence: Synthetic oligonucleotide"
cugcuucccgaauuuugaaga

SEQ ID NO: 2535 - RNA, 21 nt, Artificial Sequence
  source: /note="Description of Artificial Sequence: Synthetic oligonucleotide"
ugcuucccgaauuuugaagga

SEQ ID NO: 2536 - DNA, 21 bp, Artificial Sequence
  source: /note="Description of Artificial Sequence: Synthetic oligonucleotide"
  source: /note="Description of Combined DNA/RNA Molecule: Synthetic oligonucleotide"
cuucccgaautuugaaggaga

SEQ ID NO: 2537 - RNA, 21 nt, Artificial Sequence
  source: /note="Description of Artificial Sequence: Synthetic oligonucleotide"
gauguggagaacuaguuugga

SEQ ID NO: 2538 - RNA, 21 nt, Artificial Sequence
  source: /note="Description of Artificial Sequence: Synthetic oligonucleotide"
auguggagaacuaguuuggga

SEQ ID NO: 2539 - DNA, 21 bp, Artificial Sequence
  source: /note="Description of Artificial Sequence: Synthetic oligonucleotide"
  source: /note="Description of Combined DNA/RNA Molecule: Synthetic oligonucleotide"
uguggagaactaguuugggua

SEQ ID NO: 2540 - DNA, 21 bp, Artificial Sequence
  source: /note="Description of Artificial Sequence: Synthetic oligonucleotide"
  source: /note="Description of Combined DNA/RNA Molecule: Synthetic oligonucleotide"
uggagaactaguuuggguaga

SEQ ID NO: 2541 - DNA, 21 bp, Artificial Sequence
  source: /note="Description of Artificial Sequence: Synthetic oligonucleotide"
  source: /note="Description of Combined DNA/RNA Molecule: Synthetic oligonucleotide"
ggagaacuagtuuggguagga

SEQ ID NO: 2542 - DNA, 21 bp, Artificial Sequence
  source: /note="Description of Artificial Sequence: Synthetic oligonucleotide"
  source: /note="Description of Combined DNA/RNA Molecule: Synthetic oligonucleotide"
agaacuagtutggguaggaga

SEQ ID NO: 2543 - RNA, 21 nt, Artificial Sequence
  source: /note="Description of Artificial Sequence: Synthetic oligonucleotide"
aacagcagaaacaauuacuga

SEQ ID NO: 2544 - RNA, 21 nt, Artificial Sequence
  source: /note="Description of Artificial Sequence: Synthetic oligonucleotide"
acagcagaaacaauuacugga

SEQ ID NO: 2545 - RNA, 21 nt, Artificial Sequence
  source: /note="Description of Artificial Sequence: Synthetic oligonucleotide"
aacaauuacuggcaaguauga

SEQ ID NO: 2546 - DNA, 21 bp, Artificial Sequence
  source: /note="Description of Artificial Sequence: Synthetic oligonucleotide"
  source: /note="Description of Combined DNA/RNA Molecule: Synthetic oligonucleotide"
acaauuactggcaaguaugga

SEQ ID NO: 2547 - RNA, 21 nt, Artificial Sequence
  source: /note="Description of Artificial Sequence: Synthetic oligonucleotide"
caauuacuggcaaguauggua

SEQ ID NO: 2548 - RNA, 21 nt, Artificial Sequence
  source: /note="Description of Artificial Sequence: Synthetic oligonucleotide"
aauuacuggcaaguaugguga

SEQ ID NO: 2549 - RNA, 21 nt, Artificial Sequence
  source: /note="Description of Artificial Sequence: Synthetic oligonucleotide"
auuacuggcaaguauggugua

SEQ ID NO: 2550 - RNA, 21 nt, Artificial Sequence
  source: /note="Description of Artificial Sequence: Synthetic oligonucleotide"
uuacuggcaaguaugguguga

SEQ ID NO: 2551 - DNA, 21 bp, Artificial Sequence
  source: /note="Description of Artificial Sequence: Synthetic oligonucleotide"
  source: /note="Description of Combined DNA/RNA Molecule: Synthetic oligonucleotide"
guauggugtgtggaugcgaga

SEQ ID NO: 2552 - RNA, 21 nt, Artificial Sequence
  source: /note="Description of Artificial Sequence: Synthetic oligonucleotide"
gauguccgccagguuuuugaa

SEQ ID NO: 2553 - DNA, 21 bp, Artificial Sequence
  source: /note="Description of Artificial Sequence: Synthetic oligonucleotide"
  source: /note="Description of Combined DNA/RNA Molecule: Synthetic oligonucleotide"
uuugaguatgaccucaucaga

SEQ ID NO: 2554 - RNA, 21 nt, Artificial Sequence
  source: /note="Description of Artificial Sequence: Synthetic oligonucleotide"
accucaucagccaguuuauga

SEQ ID NO: 2555 - RNA, 21 nt, Artificial Sequence
  source: /note="Description of Artificial Sequence: Synthetic oligonucleotide"
ccucaucagccaguuuaugca

SEQ ID NO: 2556 - RNA, 21 nt, Artificial Sequence
  source: /note="Description of Artificial Sequence: Synthetic oligonucleotide"
ucaucagccaguuuaugcaga

SEQ ID NO: 2557 - RNA, 21 nt, Artificial Sequence
  source: /note="Description of Artificial Sequence: Synthetic oligonucleotide"
gcagggcuacccuucuaagga

SEQ ID NO: 2558 - RNA, 21 nt, Artificial Sequence
  source: /note="Description of Artificial Sequence: Synthetic oligonucleotide"
cagggcuacccuucuaaggua

SEQ ID NO: 2559 - DNA, 21 bp, Artificial Sequence
  source: /note="Description of Artificial Sequence: Synthetic oligonucleotide"
  source: /note="Description of Combined DNA/RNA Molecule: Synthetic oligonucleotide"
gggcuacccutcuaagguuca

SEQ ID NO: 2560 - DNA, 21 bp, Artificial Sequence
  source: /note="Description of Artificial Sequence: Synthetic oligonucleotide"
  source: /note="Description of Combined DNA/RNA Molecule: Synthetic oligonucleotide"
cuucuaaggutcacauacuga

SEQ ID NO: 2561 - DNA, 21 bp, Artificial Sequence
  source: /note="Description of Artificial Sequence: Synthetic oligonucleotide"
  source: /note="Description of Combined DNA/RNA Molecule: Synthetic oligonucleotide"
uucuaaggtucacauacugca

SEQ ID NO: 2562 - RNA, 21 nt, Artificial Sequence
  source: /note="Description of Artificial Sequence: Synthetic oligonucleotide"
guccagaacugucauaagaua

SEQ ID NO: 2563 - DNA, 21 bp, Artificial Sequence
  source: /note="Description of Artificial Sequence: Synthetic oligonucleotide"
  source: /note="Description of Combined DNA/RNA Molecule: Synthetic oligonucleotide"
cagaacugtcauaagauauga

SEQ ID NO: 2564 - DNA, 21 bp, Artificial Sequence
  source: /note="Description of Artificial Sequence: Synthetic oligonucleotide"
  source: /note="Description of Combined DNA/RNA Molecule: Synthetic oligonucleotide"
agaacugucataagauaugaa

SEQ ID NO: 2565 - RNA, 21 nt, Artificial Sequence
  source: /note="Description of Artificial Sequence: Synthetic oligonucleotide"
gaacugucauaagauaugaga

SEQ ID NO: 2566 - DNA, 21 bp, Artificial Sequence
  source: /note="Description of Artificial Sequence: Synthetic oligonucleotide"
  source: /note="Description of Combined DNA/RNA Molecule: Synthetic oligonucleotide"
aacugucataagauaugagca

SEQ ID NO: 2567 - RNA, 21 nt, Artificial Sequence
  source: /note="Description of Artificial Sequence: Synthetic oligonucleotide"
aagauaugagcugaauaccga

SEQ ID NO: 2568 - DNA, 21 bp, Artificial Sequence
  source: /note="Description of Artificial Sequence: Synthetic oligonucleotide"
  source: /note="Description of Combined DNA/RNA Molecule: Synthetic oligonucleotide"
agauaugagctgaauaccgaa

SEQ ID NO: 2569 - RNA, 21 nt, Artificial Sequence
  source: /note="Description of Artificial Sequence: Synthetic oligonucleotide"
gauaugagcugaauaccgaga

SEQ ID NO: 2570 - RNA, 21 nt, Artificial Sequence
  source: /note="Description of Artificial Sequence: Synthetic oligonucleotide"
ugaauaccgagacagugaaga

SEQ ID NO: 2571 - RNA, 21 nt, Artificial Sequence
  source: /note="Description of Artificial Sequence: Synthetic oligonucleotide"
gaauaccgagacagugaagga

SEQ ID NO: 2572 - RNA, 21 nt, Artificial Sequence
  source: /note="Description of Artificial Sequence: Synthetic oligonucleotide"
accacggacaguucccguaua

SEQ ID NO: 2573 - DNA, 21 bp, Artificial Sequence
  source: /note="Description of Artificial Sequence: Synthetic oligonucleotide"
  source: /note="Description of Combined DNA/RNA Molecule: Synthetic oligonucleotide"
cggacagutcccguauucuua

SEQ ID NO: 2574 - RNA, 21 nt, Artificial Sequence
  source: /note="Description of Artificial Sequence: Synthetic oligonucleotide"
ggacaguucccguauucuuga

SEQ ID NO: 2575 - RNA, 21 nt, Artificial Sequence
  source: /note="Description of Artificial Sequence: Synthetic oligonucleotide"
gacaguucccguauucuugga

SEQ ID NO: 2576 - DNA, 21 bp, Artificial Sequence
  source: /note="Description of Artificial Sequence: Synthetic oligonucleotide"
  source: /note="Description of Combined DNA/RNA Molecule: Synthetic oligonucleotide"
caggccuctgggucauuuaca

SEQ ID NO: 2577 - RNA, 21 nt, Artificial Sequence
  source: /note="Description of Artificial Sequence: Synthetic oligonucleotide"
aggccucugggucauuuacaa

SEQ ID NO: 2578 - DNA, 21 bp, Artificial Sequence
  source: /note="Description of Artificial Sequence: Synthetic oligonucleotide"
  source: /note="Description of Combined DNA/RNA Molecule: Synthetic oligonucleotide"
ggccucugggtcauuuacaga

SEQ ID NO: 2579 - DNA, 21 bp, Artificial Sequence
  source: /note="Description of Artificial Sequence: Synthetic oligonucleotide"
  source: /note="Description of Combined DNA/RNA Molecule: Synthetic oligonucleotide"
aggccaaaggtgccauuguca

SEQ ID NO: 2580 - RNA, 21 nt, Artificial Sequence
  source: /note="Description of Artificial Sequence: Synthetic oligonucleotide"
ccauuguccucuccaaacuga

SEQ ID NO: 2581 - DNA, 21 bp, Artificial Sequence
  source: /note="Description of Artificial Sequence: Synthetic oligonucleotide"
  source: /note="Description of Combined DNA/RNA Molecule: Synthetic oligonucleotide"
gucgccaatgccuucaucaua

SEQ ID NO: 2582 - DNA, 21 bp, Artificial Sequence
  source: /note="Description of Artificial Sequence: Synthetic oligonucleotide"
  source: /note="Description of Combined DNA/RNA Molecule: Synthetic oligonucleotide"
uaccgucaactuugcuuauga

SEQ ID NO: 2583 - DNA, 21 bp, Artificial Sequence
  source: /note="Description of Artificial Sequence: Synthetic oligonucleotide"
  source: /note="Description of Combined DNA/RNA Molecule: Synthetic oligonucleotide"
accgucaacutugcuuaugaa

SEQ ID NO: 2584 - DNA, 21 bp, Artificial Sequence
  source: /note="Description of Artificial Sequence: Synthetic oligonucleotide"
  source: /note="Description of Combined DNA/RNA Molecule: Synthetic oligonucleotide"
ccgucaactutgcuuaugaca

SEQ ID NO: 2585 - RNA, 21 nt, Artificial Sequence
  source: /note="Description of Artificial Sequence: Synthetic oligonucleotide"
uaugacacaggcacagguaua

SEQ ID NO: 2586 - DNA, 21 bp, Artificial Sequence
  source: /note="Description of Artificial Sequence: Synthetic oligonucleotide"
  source: /note="Description of Combined DNA/RNA Molecule: Synthetic oligonucleotide"
acccugaccatcccauucaaa

SEQ ID NO: 2587 - RNA, 21 nt, Artificial Sequence
  source: /note="Description of Artificial Sequence: Synthetic oligonucleotide"
cccugaccaucccauucaaga

SEQ ID NO: 2588 - DNA, 21 bp, Artificial Sequence
  source: /note="Description of Artificial Sequence: Synthetic oligonucleotide"
  source: /note="Description of Combined DNA/RNA Molecule: Synthetic oligonucleotide"
accaucccautcaagaaccga

SEQ ID NO: 2589 - DNA, 21 bp, Artificial Sequence
  source: /note="Description of Artificial Sequence: Synthetic oligonucleotide"
  source: /note="Description of Combined DNA/RNA Molecule: Synthetic oligonucleotide"
ccaucccatucaagaaccgca

SEQ ID NO: 2590 - RNA, 21 nt, Artificial Sequence
  source: /note="Description of Artificial Sequence: Synthetic oligonucleotide"
uaaguacagcagcaugauuga

SEQ ID NO: 2591 - RNA, 21 nt, Artificial Sequence
  source: /note="Description of Artificial Sequence: Synthetic oligonucleotide"
aaguacagcagcaugauugaa

SEQ ID NO: 2592 - RNA, 21 nt, Artificial Sequence
  source: /note="Description of Artificial Sequence: Synthetic oligonucleotide"
guacagcagcaugauugacua

SEQ ID NO: 2593 - DNA, 21 bp, Artificial Sequence
  source: /note="Description of Artificial Sequence: Synthetic oligonucleotide"
  source: /note="Description of Combined DNA/RNA Molecule: Synthetic oligonucleotide"
ucuuugcctgggacaacuuga

SEQ ID NO: 2594 - RNA, 21 nt, Artificial Sequence
  source: /note="Description of Artificial Sequence: Synthetic oligonucleotide"
ugaacauggucacuuaugaca

SEQ ID NO: 2595 - RNA, 21 nt, Artificial Sequence
  source: /note="Description of Artificial Sequence: Synthetic oligonucleotide"
aucaagcucuccaagauguga

SEQ ID NO: 2596 - DNA, 21 bp, Artificial Sequence
  source: /note="Description of Artificial Sequence: Synthetic oligonucleotide"
  source: /note="Description of Combined DNA/RNA Molecule: Synthetic oligonucleotide"
ucaagcuctccaagaugugaa

SEQ ID NO: 2597 - DNA, 21 bp, Artificial Sequence
  source: /note="Description of Artificial Sequence: Synthetic oligonucleotide"
  source: /note="Description of Combined DNA/RNA Molecule: Synthetic oligonucleotide"
uucaggaatuguagucugaga

SEQ ID NO: 2598 - RNA, 21 nt, Artificial Sequence
  source: /note="Description of Artificial Sequence: Synthetic oligonucleotide"
uaucuucugucagcauuuaua

SEQ ID NO: 2599 - DNA, 21 bp, Artificial Sequence
  source: /note="Description of Artificial Sequence: Synthetic oligonucleotide"
  source: /note="Description of Combined DNA/RNA Molecule: Synthetic oligonucleotide"
aucuucugtcagcauuuauga

SEQ ID NO: 2600 - RNA, 21 nt, Artificial Sequence
  source: /note="Description of Artificial Sequence: Synthetic oligonucleotide"
ucuucugucagcauuuaugga

SEQ ID NO: 2601 - RNA, 21 nt, Artificial Sequence
  source: /note="Description of Artificial Sequence: Synthetic oligonucleotide"
cuucugucagcauuuauggga

SEQ ID NO: 2602 - DNA, 21 bp, Artificial Sequence
  source: /note="Description of Artificial Sequence: Synthetic oligonucleotide"
  source: /note="Description of Combined DNA/RNA Molecule: Synthetic oligonucleotide"
ucugucagcatuuaugggaua

SEQ ID NO: 2603 - DNA, 21 bp, Artificial Sequence
  source: /note="Description of Artificial Sequence: Synthetic oligonucleotide"
  source: /note="Description of Combined DNA/RNA Molecule: Synthetic oligonucleotide"
cugucagcautuaugggauga

SEQ ID NO: 2604 - RNA, 21 nt, Artificial Sequence
  source: /note="Description of Artificial Sequence: Synthetic oligonucleotide"
cauuuaugggauguuuaauga

SEQ ID NO: 2605 - DNA, 21 bp, Artificial Sequence
  source: /note="Description of Artificial Sequence: Synthetic oligonucleotide"
  source: /note="Description of Combined DNA/RNA Molecule: Synthetic oligonucleotide"
auuuaugggatguuuaaugaa

SEQ ID NO: 2606 - RNA, 21 nt, Artificial Sequence
  source: /note="Description of Artificial Sequence: Synthetic oligonucleotide"
uuuaugggauguuuaaugaca

SEQ ID NO: 2607 - RNA, 21 nt, Artificial Sequence
  source: /note="Description of Artificial Sequence: Synthetic oligonucleotide"
gauguuuaaugacauaguuca

SEQ ID NO: 2608 - DNA, 21 bp, Artificial Sequence
  source: /note="Description of Artificial Sequence: Synthetic oligonucleotide"
  source: /note="Description of Combined DNA/RNA Molecule: Synthetic oligonucleotide"
ugacauagtucaaguuuucua

SEQ ID NO: 2609 - DNA, 21 bp, Artificial Sequence
  source: /note="Description of Artificial Sequence: Synthetic oligonucleotide"
  source: /note="Description of Combined DNA/RNA Molecule: Synthetic oligonucleotide"
gacauagutcaaguuuucuua

SEQ ID NO: 2610 - RNA, 21 nt, Artificial Sequence
  source: /note="Description of Artificial Sequence: Synthetic oligonucleotide"
acauaguucaaguuuucuuga

SEQ ID NO: 2611 - RNA, 21 nt, Artificial Sequence
  source: /note="Description of Artificial Sequence: Synthetic oligonucleotide"
cauaguucaaguuuucuugua

SEQ ID NO: 2612 - DNA, 21 bp, Artificial Sequence
  source: /note="Description of Artificial Sequence: Synthetic oligonucleotide"
  source: /note="Description of Combined DNA/RNA Molecule: Synthetic oligonucleotide"
auaguucaagtuuucuuguga

SEQ ID NO: 2613 - DNA, 21 bp, Artificial Sequence
  source: /note="Description of Artificial Sequence: Synthetic oligonucleotide"
  source: /note="Description of Combined DNA/RNA Molecule: Synthetic oligonucleotide"
uaguucaagutuucuugugaa

SEQ ID NO: 2614 - DNA, 21 bp, Artificial Sequence
  source: /note="Description of Artificial Sequence: Synthetic oligonucleotide"
  source: /note="Description of Combined DNA/RNA Molecule: Synthetic oligonucleotide"
aguucaagtutucuugugaua

SEQ ID NO: 2615 - DNA, 21 bp, Artificial Sequence
  source: /note="Description of Artificial Sequence: Synthetic oligonucleotide"
  source: /note="Description of Combined DNA/RNA Molecule: Synthetic oligonucleotide"
ucaaguuutctugugauuuga

SEQ ID NO: 2616 - DNA, 21 bp, Artificial Sequence
  source: /note="Description of Artificial Sequence: Synthetic oligonucleotide"
  source: /note="Description of Combined DNA/RNA Molecule: Synthetic oligonucleotide"
gaaaaccatugcucuugcaua

SEQ ID NO: 2617 - DNA, 21 bp, Artificial Sequence
  source: /note="Description of Artificial Sequence: Synthetic oligonucleotide"
  source: /note="Description of Combined DNA/RNA Molecule: Synthetic oligonucleotide"
aaaaccautgcucuugcauga

SEQ ID NO: 2618 - DNA, 21 bp, Artificial Sequence
  source: /note="Description of Artificial Sequence: Synthetic oligonucleotide"
  source: /note="Description of Combined DNA/RNA Molecule: Synthetic oligonucleotide"
auugcucutgcauguuacaua

SEQ ID NO: 2619 - RNA, 21 nt, Artificial Sequence
  source: /note="Description of Artificial Sequence: Synthetic oligonucleotide"
uugcucuugcauguuacauga

SEQ ID NO: 2620 - DNA, 21 bp, Artificial Sequence
  source: /note="Description of Artificial Sequence: Synthetic oligonucleotide"
  source: /note="Description of Combined DNA/RNA Molecule: Synthetic oligonucleotide"
cucuugcatgtuacaugguua

SEQ ID NO: 2621 - DNA, 21 bp, Artificial Sequence
  source: /note="Description of Artificial Sequence: Synthetic oligonucleotide"
  source: /note="Description of Combined DNA/RNA Molecule: Synthetic oligonucleotide"
ucuugcaugutacaugguuaa

SEQ ID NO: 2622 - RNA, 21 nt, Artificial Sequence
  source: /note="Description of Artificial Sequence: Synthetic oligonucleotide"
aaaagcauaacuucuaaagga

SEQ ID NO: 2623 - DNA, 21 bp, Artificial Sequence
  source: /note="Description of Artificial Sequence: Synthetic oligonucleotide"
  source: /note="Description of Combined DNA/RNA Molecule: Synthetic oligonucleotide"
aaagcauaactucuaaaggaa

SEQ ID NO: 2624 - RNA, 21 nt, Artificial Sequence
  source: /note="Description of Artificial Sequence: Synthetic oligonucleotide"
ucuaaaggaagcagaauagca

SEQ ID NO: 2625 - RNA, 21 nt, Artificial Sequence
  source: /note="Description of Artificial Sequence: Synthetic oligonucleotide"
cuaaaggaagcagaauagcua

SEQ ID NO: 2626 - DNA, 21 bp, Artificial Sequence
  source: /note="Description of Artificial Sequence: Synthetic oligonucleotide"
  source: /note="Description of Combined DNA/RNA Molecule: Synthetic oligonucleotide"
aaguaagatgcauuuacuaca

SEQ ID NO: 2627 - RNA, 21 nt, Artificial Sequence
  source: /note="Description of Artificial Sequence: Synthetic oligonucleotide"
guuggcuucuaaugcuucaga

SEQ ID NO: 2628 - DNA, 21 bp, Artificial Sequence
  source: /note="Description of Artificial Sequence: Synthetic oligonucleotide"
  source: /note="Description of Combined DNA/RNA Molecule: Synthetic oligonucleotide"
ucuaaugctucagauagaaua

SEQ ID NO: 2629 - DNA, 21 bp, Artificial Sequence
  source: /note="Description of Artificial Sequence: Synthetic oligonucleotide"
  source: /note="Description of Combined DNA/RNA Molecule: Synthetic oligonucleotide"
augcuucagatagaauacaga

SEQ ID NO: 2630 - RNA, 21 nt, Artificial Sequence
  source: /note="Description of Artificial Sequence: Synthetic oligonucleotide"
cuucagauagaauacaguuga

SEQ ID NO: 2631 - DNA, 23 bp, Artificial Sequence
  source: /note="Description of Artificial Sequence: Synthetic oligonucleotide"
  source: /note="Description of Combined DNA/RNA Molecule: Synthetic oligonucleotide"
utggaaagcuctgcugugcugag

SEQ ID NO: 2632 - RNA, 23 nt, Artificial Sequence
  source: /note="Description of Artificial Sequence: Synthetic oligonucleotide"
ucuggaaagcucugcugugcuga

SEQ ID NO: 2633 - DNA, 23 bp, Artificial Sequence
  source: /note="Description of Artificial Sequence: Synthetic oligonucleotide"
  source: /note="Description of Combined DNA/RNA Molecule: Synthetic oligonucleotide"
ucaacgtgcacagaagaaccuca

SEQ ID NO: 2634 - RNA, 23 nt, Artificial Sequence
  source: /note="Description of Artificial Sequence: Synthetic oligonucleotide"
ugcaacgugcacagaagaaccuc

SEQ ID NO: 2635 - DNA, 23 bp, Artificial Sequence
  source: /note="Description of Artificial Sequence: Synthetic oligonucleotide"
  source: /note="Description of Combined DNA/RNA Molecule: Synthetic oligonucleotide"
ucuggatucautgggacuggcca

SEQ ID NO: 2636 - DNA, 23 bp, Artificial Sequence
  source: /note="Description of Artificial Sequence: Synthetic oligonucleotide"
  source: /note="Description of Combined DNA/RNA Molecule: Synthetic oligonucleotide"
ucagaacugactugucucggagg

SEQ ID NO: 2637 - DNA, 23 bp, Artificial Sequence
  source: /note="Description of Artificial Sequence: Synthetic oligonucleotide"
  source: /note="Description of Combined DNA/RNA Molecule: Synthetic oligonucleotide"
uccagaacugacutgucucggag

SEQ ID NO: 2638 - DNA, 23 bp, Artificial Sequence
  source: /note="Description of Artificial Sequence: Synthetic oligonucleotide"
  source: /note="Description of Combined DNA/RNA Molecule: Synthetic oligonucleotide"
utagaaacuuctctggagccugg

SEQ ID NO: 2639 - RNA, 23 nt, Artificial Sequence
  source: /note="Description of Artificial Sequence: Synthetic oligonucleotide"
uguagaaacuucucuggagccug

SEQ ID NO: 2640 - RNA, 23 nt, Artificial Sequence
  source: /note="Description of Artificial Sequence: Synthetic oligonucleotide"
uccaaaguguccaaauuccacgu

SEQ ID NO: 2641 - RNA, 23 nt, Artificial Sequence
  source: /note="Description of Artificial Sequence: Synthetic oligonucleotide"
ugccaaaguguccaaauuccacg

SEQ ID NO: 2642 - DNA, 23 bp, Artificial Sequence
  source: /note="Description of Artificial Sequence: Synthetic oligonucleotide"
  source: /note="Description of Combined DNA/RNA Molecule: Synthetic oligonucleotide"
uggccaaagugtccaaauuccac

SEQ ID NO: 2643 - RNA, 23 nt, Artificial Sequence
  source: /note="Description of Artificial Sequence: Synthetic oligonucleotide"
uaggccaaaguguccaaauucca

SEQ ID NO: 2644 - RNA, 23 nt, Artificial Sequence
  source: /note="Description of Artificial Sequence: Synthetic oligonucleotide"
uccuggaaggccaaaguguccaa

SEQ ID NO: 2645 - DNA, 23 bp, Artificial Sequence
  source: /note="Description of Artificial Sequence: Synthetic oligonucleotide"
  source: /note="Description of Combined DNA/RNA Molecule: Synthetic oligonucleotide"
ucucggacuucagtuccuggaag

SEQ ID NO: 2646 - DNA, 23 bp, Artificial Sequence
  source: /note="Description of Artificial Sequence: Synthetic oligonucleotide"
  source: /note="Description of Combined DNA/RNA Molecule: Synthetic oligonucleotide"
ucagtuagcucggacuucaguuc

SEQ ID NO: 2647 - DNA, 23 bp, Artificial Sequence
  source: /note="Description of Artificial Sequence: Synthetic oligonucleotide"
  source: /note="Description of Combined DNA/RNA Molecule: Synthetic oligonucleotide"
ucaggaacuucagtuagcucgga

SEQ ID NO: 2648 - RNA, 23 nt, Artificial Sequence
  source: /note="Description of Artificial Sequence: Synthetic oligonucleotide"
ucgggaagcaggaacuucaguua

SEQ ID NO: 2649 - DNA, 23 bp, Artificial Sequence
  source: /note="Description of Artificial Sequence: Synthetic oligonucleotide"
  source: /note="Description of Combined DNA/RNA Molecule: Synthetic oligonucleotide"
uaaaautcgggaagcaggaacuu

SEQ ID NO: 2650 - DNA, 23 bp, Artificial Sequence
  source: /note="Description of Artificial Sequence: Synthetic oligonucleotide"
  source: /note="Description of Combined DNA/RNA Molecule: Synthetic oligonucleotide"
utcaaaauucgggaagcaggaac

SEQ ID NO: 2651 - DNA, 23 bp, Artificial Sequence
  source: /note="Description of Artificial Sequence: Synthetic oligonucleotide"
  source: /note="Description of Combined DNA/RNA Molecule: Synthetic oligonucleotide"
utucaaaauucgggaagcaggaa

SEQ ID NO: 2652 - RNA, 23 nt, Artificial Sequence
  source: /note="Description of Artificial Sequence: Synthetic oligonucleotide"
ucuucaaaauucgggaagcagga

SEQ ID NO: 2653 - DNA, 23 bp, Artificial Sequence
  source: /note="Description of Artificial Sequence: Synthetic oligonucleotide"
  source: /note="Description of Combined DNA/RNA Molecule: Synthetic oligonucleotide"
uccutcaaaautcgggaagcagg

SEQ ID NO: 2654 - DNA, 23 bp, Artificial Sequence
  source: /note="Description of Artificial Sequence: Synthetic oligonucleotide"
  source: /note="Description of Combined DNA/RNA Molecule: Synthetic oligonucleotide"
ucuccutcaaaautcgggaagca

SEQ ID NO: 2655 - DNA, 23 bp, Artificial Sequence
  source: /note="Description of Artificial Sequence: Synthetic oligonucleotide"
  source: /note="Description of Combined DNA/RNA Molecule: Synthetic oligonucleotide"
uccaaacuagutctccacauccg

SEQ ID NO: 2656 - DNA, 23 bp, Artificial Sequence
  source: /note="Description of Artificial Sequence: Synthetic oligonucleotide"
  source: /note="Description of Combined DNA/RNA Molecule: Synthetic oligonucleotide"
ucccaaacuagtucuccacaucc

SEQ ID NO: 2657 - DNA, 23 bp, Artificial Sequence
  source: /note="Description of Artificial Sequence: Synthetic oligonucleotide"
  source: /note="Description of Combined DNA/RNA Molecule: Synthetic oligonucleotide"
uacccaaacuagutcuccacauc

SEQ ID NO: 2658 - DNA, 23 bp, Artificial Sequence
  source: /note="Description of Artificial Sequence: Synthetic oligonucleotide"
  source: /note="Description of Combined DNA/RNA Molecule: Synthetic oligonucleotide"
ucuacccaaactaguucuccaca

SEQ ID NO: 2659 - RNA, 23 nt, Artificial Sequence
  source: /note="Description of Artificial Sequence: Synthetic oligonucleotide"
uccuacccaaacuaguucuccac

SEQ ID NO: 2660 - RNA, 23 nt, Artificial Sequence
  source: /note="Description of Artificial Sequence: Synthetic oligonucleotide"
ucuccuacccaaacuaguucucc

SEQ ID NO: 2661 - DNA, 23 bp, Artificial Sequence
  source: /note="Description of Artificial Sequence: Synthetic oligonucleotide"
  source: /note="Description of Combined DNA/RNA Molecule: Synthetic oligonucleotide"
ucagtaauugutucugcuguucu

SEQ ID NO: 2662 - DNA, 23 bp, Artificial Sequence
  source: /note="Description of Artificial Sequence: Synthetic oligonucleotide"
  source: /note="Description of Combined DNA/RNA Molecule: Synthetic oligonucleotide"
uccaguaauugtutcugcuguuc

SEQ ID NO: 2663 - DNA, 23 bp, Artificial Sequence
  source: /note="Description of Artificial Sequence: Synthetic oligonucleotide"
  source: /note="Description of Combined DNA/RNA Molecule: Synthetic oligonucleotide"
ucauactugccagtaauuguuuc

SEQ ID NO: 2664 - DNA, 23 bp, Artificial Sequence
  source: /note="Description of Artificial Sequence: Synthetic oligonucleotide"
  source: /note="Description of Combined DNA/RNA Molecule: Synthetic oligonucleotide"
uccatacuugccaguaauuguuu

SEQ ID NO: 2665 - RNA, 23 nt, Artificial Sequence
  source: /note="Description of Artificial Sequence: Synthetic oligonucleotide"
uaccauacuugccaguaauuguu

SEQ ID NO: 2666 - DNA, 23 bp, Artificial Sequence
  source: /note="Description of Artificial Sequence: Synthetic oligonucleotide"
  source: /note="Description of Combined DNA/RNA Molecule: Synthetic oligonucleotide"
ucaccatacuugccaguaauugu

SEQ ID NO: 2667 - DNA, 23 bp, Artificial Sequence
  source: /note="Description of Artificial Sequence: Synthetic oligonucleotide"
  source: /note="Description of Combined DNA/RNA Molecule: Synthetic oligonucleotide"
uacaccauacutgccaguaauug

SEQ ID NO: 2668 - DNA, 23 bp, Artificial Sequence
  source: /note="Description of Artificial Sequence: Synthetic oligonucleotide"
  source: /note="Description of Combined DNA/RNA Molecule: Synthetic oligonucleotide"
ucacaccauactugccaguaauu

SEQ ID NO: 2669 - RNA, 23 nt, Artificial Sequence
  source: /note="Description of Artificial Sequence: Synthetic oligonucleotide"
ucucgcauccacacaccauacuu

SEQ ID NO: 2670 - DNA, 23 bp, Artificial Sequence
  source: /note="Description of Artificial Sequence: Synthetic oligonucleotide"
  source: /note="Description of Combined DNA/RNA Molecule: Synthetic oligonucleotide"
utcaaaaaccuggcggacauccg

SEQ ID NO: 2671 - DNA, 23 bp, Artificial Sequence
  source: /note="Description of Artificial Sequence: Synthetic oligonucleotide"
  source: /note="Description of Combined DNA/RNA Molecule: Synthetic oligonucleotide"
ucugaugaggucatacucaaaaa

SEQ ID NO: 2672 - RNA, 23 nt, Artificial Sequence
  source: /note="Description of Artificial Sequence: Synthetic oligonucleotide"
ucauaaacuggcugaugagguca

SEQ ID NO: 2673 - DNA, 23 bp, Artificial Sequence
  source: /note="Description of Artificial Sequence: Synthetic oligonucleotide"
  source: /note="Description of Combined DNA/RNA Molecule: Synthetic oligonucleotide"
ugcataaacuggctgaugagguc

SEQ ID NO: 2674 - DNA, 23 bp, Artificial Sequence
  source: /note="Description of Artificial Sequence: Synthetic oligonucleotide"
  source: /note="Description of Combined DNA/RNA Molecule: Synthetic oligonucleotide"
ucugcataaactggcugaugagg

SEQ ID NO: 2675 - DNA, 23 bp, Artificial Sequence
  source: /note="Description of Artificial Sequence: Synthetic oligonucleotide"
  source: /note="Description of Combined DNA/RNA Molecule: Synthetic oligonucleotide"
uccutagaaggguagcccugcau

SEQ ID NO: 2676 - DNA, 23 bp, Artificial Sequence
  source: /note="Description of Artificial Sequence: Synthetic oligonucleotide"
  source: /note="Description of Combined DNA/RNA Molecule: Synthetic oligonucleotide"
uacctuagaagggtagcccugca

SEQ ID NO: 2677 - DNA, 23 bp, Artificial Sequence
  source: /note="Description of Artificial Sequence: Synthetic oligonucleotide"
  source: /note="Description of Combined DNA/RNA Molecule: Synthetic oligonucleotide"
ugaacctuagaaggguagcccug

SEQ ID NO: 2678 - DNA, 23 bp, Artificial Sequence
  source: /note="Description of Artificial Sequence: Synthetic oligonucleotide"
  source: /note="Description of Combined DNA/RNA Molecule: Synthetic oligonucleotide"
ucagtatgugaaccuuagaaggg

SEQ ID NO: 2679 - RNA, 23 nt, Artificial Sequence
  source: /note="Description of Artificial Sequence: Synthetic oligonucleotide"
ugcaguaugugaaccuuagaagg

SEQ ID NO: 2680 - DNA, 23 bp, Artificial Sequence
  source: /note="Description of Artificial Sequence: Synthetic oligonucleotide"
  source: /note="Description of Combined DNA/RNA Molecule: Synthetic oligonucleotide"
uauctuaugacagtucuggacuc

SEQ ID NO: 2681 - RNA, 23 nt, Artificial Sequence
  source: /note="Description of Artificial Sequence: Synthetic oligonucleotide"
ucauaucuuaugacaguucugga

SEQ ID NO: 2682 - DNA, 23 bp, Artificial Sequence
  source: /note="Description of Artificial Sequence: Synthetic oligonucleotide"
  source: /note="Description of Combined DNA/RNA Molecule: Synthetic oligonucleotide"
utcatatcuuatgacaguucugg

SEQ ID NO: 2683 - RNA, 23 nt, Artificial Sequence
  source: /note="Description of Artificial Sequence: Synthetic oligonucleotide"
ucucauaucuuaugacaguucug

SEQ ID NO: 2684 - DNA, 23 bp, Artificial Sequence
  source: /note="Description of Artificial Sequence: Synthetic oligonucleotide"
  source: /note="Description of Combined DNA/RNA Molecule: Synthetic oligonucleotide"
ugcucataucutatgacaguucu

SEQ ID NO: 2685 - DNA, 23 bp, Artificial Sequence
  source: /note="Description of Artificial Sequence: Synthetic oligonucleotide"
  source: /note="Description of Combined DNA/RNA Molecule: Synthetic oligonucleotide"
ucggtatucagcucauaucuuau

SEQ ID NO: 2686 - DNA, 23 bp, Artificial Sequence
  source: /note="Description of Artificial Sequence: Synthetic oligonucleotide"
  source: /note="Description of Combined DNA/RNA Molecule: Synthetic oligonucleotide"
utcgguauucagctcauaucuua

SEQ ID NO: 2687 - DNA, 23 bp, Artificial Sequence
  source: /note="Description of Artificial Sequence: Synthetic oligonucleotide"
  source: /note="Description of Combined DNA/RNA Molecule: Synthetic oligonucleotide"
ucucggtauucagcucauaucuu

SEQ ID NO: 2688 - DNA, 23 bp, Artificial Sequence
  source: /note="Description of Artificial Sequence: Synthetic oligonucleotide"
  source: /note="Description of Combined DNA/RNA Molecule: Synthetic oligonucleotide"
ucuucacuguctcgguauucagc

SEQ ID NO: 2689 - DNA, 23 bp, Artificial Sequence
  source: /note="Description of Artificial Sequence: Synthetic oligonucleotide"
  source: /note="Description of Combined DNA/RNA Molecule: Synthetic oligonucleotide"
uccutcacugucucgguauucag

SEQ ID NO: 2690 - DNA, 23 bp, Artificial Sequence
  source: /note="Description of Artificial Sequence: Synthetic oligonucleotide"
  source: /note="Description of Combined DNA/RNA Molecule: Synthetic oligonucleotide"
uauacgggaactgtccgugguag

SEQ ID NO: 2691 - DNA, 23 bp, Artificial Sequence
  source: /note="Description of Artificial Sequence: Synthetic oligonucleotide"
  source: /note="Description of Combined DNA/RNA Molecule: Synthetic oligonucleotide"
uaagaatacgggaacuguccgug

SEQ ID NO: 2692 - RNA, 23 nt, Artificial Sequence
  source: /note="Description of Artificial Sequence: Synthetic oligonucleotide"
ucaagaauacgggaacuguccgu

SEQ ID NO: 2693 - RNA, 23 nt, Artificial Sequence
  source: /note="Description of Artificial Sequence: Synthetic oligonucleotide"
uccaagaauacgggaacuguccg

SEQ ID NO: 2694 - DNA, 23 bp, Artificial Sequence
  source: /note="Description of Artificial Sequence: Synthetic oligonucleotide"
  source: /note="Description of Combined DNA/RNA Molecule: Synthetic oligonucleotide"
uguaaatgacccagaggccugcu

SEQ ID NO: 2695 - DNA, 23 bp, Artificial Sequence
  source: /note="Description of Artificial Sequence: Synthetic oligonucleotide"
  source: /note="Description of Combined DNA/RNA Molecule: Synthetic oligonucleotide"
utguaaaugacccagaggccugc

SEQ ID NO: 2696 - DNA, 23 bp, Artificial Sequence
  source: /note="Description of Artificial Sequence: Synthetic oligonucleotide"
  source: /note="Description of Combined DNA/RNA Molecule: Synthetic oligonucleotide"
ucugtaaaugacccagaggccug

SEQ ID NO: 2697 - DNA, 23 bp, Artificial Sequence
  source: /note="Description of Artificial Sequence: Synthetic oligonucleotide"
  source: /note="Description of Combined DNA/RNA Molecule: Synthetic oligonucleotide"
ugacaatggcacctuuggccuca

SEQ ID NO: 2698 - DNA, 23 bp, Artificial Sequence
  source: /note="Description of Artificial Sequence: Synthetic oligonucleotide"
  source: /note="Description of Combined DNA/RNA Molecule: Synthetic oligonucleotide"
ucagtutggagaggacaauggca

SEQ ID NO: 2699 - DNA, 23 bp, Artificial Sequence
  source: /note="Description of Artificial Sequence: Synthetic oligonucleotide"
  source: /note="Description of Combined DNA/RNA Molecule: Synthetic oligonucleotide"
uaugaugaaggcatuggcgacug

SEQ ID NO: 2700 - DNA, 23 bp, Artificial Sequence
  source: /note="Description of Artificial Sequence: Synthetic oligonucleotide"
  source: /note="Description of Combined DNA/RNA Molecule: Synthetic oligonucleotide"
ucauaagcaaagutgacgguagc

SEQ ID NO: 2701 - DNA, 23 bp, Artificial Sequence
  source: /note="Description of Artificial Sequence: Synthetic oligonucleotide"
  source: /note="Description of Combined DNA/RNA Molecule: Synthetic oligonucleotide"
utcataagcaaagtugacgguag

SEQ ID NO: 2702 - RNA, 23 nt, Artificial Sequence
  source: /note="Description of Artificial Sequence: Synthetic oligonucleotide"
ugucauaagcaaaguugacggua

SEQ ID NO: 2703 - DNA, 23 bp, Artificial Sequence
  source: /note="Description of Artificial Sequence: Synthetic oligonucleotide"
  source: /note="Description of Combined DNA/RNA Molecule: Synthetic oligonucleotide"
uauacctgugccugugucauaag

SEQ ID NO: 2704 - DNA, 23 bp, Artificial Sequence
  source: /note="Description of Artificial Sequence: Synthetic oligonucleotide"
  source: /note="Description of Combined DNA/RNA Molecule: Synthetic oligonucleotide"
utugaatgggatggucagggucu

SEQ ID NO: 2705 - RNA, 23 nt, Artificial Sequence
  source: /note="Description of Artificial Sequence: Synthetic oligonucleotide"
ucuugaaugggauggucaggguc

SEQ ID NO: 2706 - DNA, 23 bp, Artificial Sequence
  source: /note="Description of Artificial Sequence: Synthetic oligonucleotide"
  source: /note="Description of Combined DNA/RNA Molecule: Synthetic oligonucleotide"
ucggtucuugaaugggaugguca

SEQ ID NO: 2707 - DNA, 23 bp, Artificial Sequence
  source: /note="Description of Artificial Sequence: Synthetic oligonucleotide"
  source: /note="Description of Combined DNA/RNA Molecule: Synthetic oligonucleotide"
ugcggutcuugaatgggaugguc

SEQ ID NO: 2708 - DNA, 23 bp, Artificial Sequence
  source: /note="Description of Artificial Sequence: Synthetic oligonucleotide"
  source: /note="Description of Combined DNA/RNA Molecule: Synthetic oligonucleotide"
ucaatcaugcugctguacuuaua

SEQ ID NO: 2709 - DNA, 23 bp, Artificial Sequence
  source: /note="Description of Artificial Sequence: Synthetic oligonucleotide"
  source: /note="Description of Combined DNA/RNA Molecule: Synthetic oligonucleotide"
utcaaucaugctgcuguacuuau

SEQ ID NO: 2710 - DNA, 23 bp, Artificial Sequence
  source: /note="Description of Artificial Sequence: Synthetic oligonucleotide"
  source: /note="Description of Combined DNA/RNA Molecule: Synthetic oligonucleotide"
uagucaaucaugctgcuguacuu

SEQ ID NO: 2711 - DNA, 23 bp, Artificial Sequence
  source: /note="Description of Artificial Sequence: Synthetic oligonucleotide"
  source: /note="Description of Combined DNA/RNA Molecule: Synthetic oligonucleotide"
ucaagutgucccaggcaaagagc

SEQ ID NO: 2712 - RNA, 23 nt, Artificial Sequence
  source: /note="Description of Artificial Sequence: Synthetic oligonucleotide"
ugucauaagugaccauguucaag

SEQ ID NO: 2713 - RNA, 23 nt, Artificial Sequence
  source: /note="Description of Artificial Sequence: Synthetic oligonucleotide"
ucacaucuuggagagcuugaugu

SEQ ID NO: 2714 - DNA, 23 bp, Artificial Sequence
  source: /note="Description of Artificial Sequence: Synthetic oligonucleotide"
  source: /note="Description of Combined DNA/RNA Molecule: Synthetic oligonucleotide"
utcacatcuuggagagcuugaug

SEQ ID NO: 2715 - DNA, 23 bp, Artificial Sequence
  source: /note="Description of Artificial Sequence: Synthetic oligonucleotide"
  source: /note="Description of Combined DNA/RNA Molecule: Synthetic oligonucleotide"
ucucagacuacaatuccugaaua

SEQ ID NO: 2716 - DNA, 23 bp, Artificial Sequence
  source: /note="Description of Artificial Sequence: Synthetic oligonucleotide"
  source: /note="Description of Combined DNA/RNA Molecule: Synthetic oligonucleotide"
uauaaatgcugacagaagauaaa

SEQ ID NO: 2717 - RNA, 23 nt, Artificial Sequence
  source: /note="Description of Artificial Sequence: Synthetic oligonucleotide"
ucauaaaugcugacagaagauaa

SEQ ID NO: 2718 - DNA, 23 bp, Artificial Sequence
  source: /note="Description of Artificial Sequence: Synthetic oligonucleotide"
  source: /note="Description of Combined DNA/RNA Molecule: Synthetic oligonucleotide"
uccataaaugctgacagaagaua

SEQ ID NO: 2719 - RNA, 23 nt, Artificial Sequence
  source: /note="Description of Artificial Sequence: Synthetic oligonucleotide"
ucccauaaaugcugacagaagau

SEQ ID NO: 2720 - DNA, 23 bp, Artificial Sequence
  source: /note="Description of Artificial Sequence: Synthetic oligonucleotide"
  source: /note="Description of Combined DNA/RNA Molecule: Synthetic oligonucleotide"
uaucccauaaatgcugacagaag

SEQ ID NO: 2721 - RNA, 23 nt, Artificial Sequence
  source: /note="Description of Artificial Sequence: Synthetic oligonucleotide"
ucaucccauaaaugcugacagaa

SEQ ID NO: 2722 - DNA, 23 bp, Artificial Sequence
  source: /note="Description of Artificial Sequence: Synthetic oligonucleotide"
  source: /note="Description of Combined DNA/RNA Molecule: Synthetic oligonucleotide"
ucautaaacaucccauaaaugcu

SEQ ID NO: 2723 - DNA, 23 bp, Artificial Sequence
  source: /note="Description of Artificial Sequence: Synthetic oligonucleotide"
  source: /note="Description of Combined DNA/RNA Molecule: Synthetic oligonucleotide"
utcatuaaacatcccauaaaugc

SEQ ID NO: 2724 - DNA, 23 bp, Artificial Sequence
  source: /note="Description of Artificial Sequence: Synthetic oligonucleotide"
  source: /note="Description of Combined DNA/RNA Molecule: Synthetic oligonucleotide"
ugucautaaacaucccauaaaug

SEQ ID NO: 2725 - DNA, 23 bp, Artificial Sequence
  source: /note="Description of Artificial Sequence: Synthetic oligonucleotide"
  source: /note="Description of Combined DNA/RNA Molecule: Synthetic oligonucleotide"
ugaacuaugucautaaacauccc

SEQ ID NO: 2726 - RNA, 23 nt, Artificial Sequence
  source: /note="Description of Artificial Sequence: Synthetic oligonucleotide"
uagaaaacuugaacuaugucauu

SEQ ID NO: 2727 - RNA, 23 nt, Artificial Sequence
  source: /note="Description of Artificial Sequence: Synthetic oligonucleotide"
uaagaaaacuugaacuaugucau

SEQ ID NO: 2728 - DNA, 23 bp, Artificial Sequence
  source: /note="Description of Artificial Sequence: Synthetic oligonucleotide"
  source: /note="Description of Combined DNA/RNA Molecule: Synthetic oligonucleotide"
ucaagaaaacutgaacuauguca

SEQ ID NO: 2729 - DNA, 23 bp, Artificial Sequence
  source: /note="Description of Artificial Sequence: Synthetic oligonucleotide"
  source: /note="Description of Combined DNA/RNA Molecule: Synthetic oligonucleotide"
uacaagaaaactugaacuauguc

SEQ ID NO: 2730 - DNA, 23 bp, Artificial Sequence
  source: /note="Description of Artificial Sequence: Synthetic oligonucleotide"
  source: /note="Description of Combined DNA/RNA Molecule: Synthetic oligonucleotide"
ucacaagaaaacutgaacuaugu

SEQ ID NO: 2731 - DNA, 23 bp, Artificial Sequence
  source: /note="Description of Artificial Sequence: Synthetic oligonucleotide"
  source: /note="Description of Combined DNA/RNA Molecule: Synthetic oligonucleotide"
utcacaagaaaactugaacuaug

SEQ ID NO: 2732 - RNA, 23 nt, Artificial Sequence
  source: /note="Description of Artificial Sequence: Synthetic oligonucleotide"
uaucacaagaaaacuugaacuau

SEQ ID NO: 2733 - RNA, 23 nt, Artificial Sequence
  source: /note="Description of Artificial Sequence: Synthetic oligonucleotide"
ucaaaucacaagaaaacuugaac

SEQ ID NO: 2734 - DNA, 23 bp, Artificial Sequence
  source: /note="Description of Artificial Sequence: Synthetic oligonucleotide"
  source: /note="Description of Combined DNA/RNA Molecule: Synthetic oligonucleotide"
uaugcaagagcaatgguuuucag

SEQ ID NO: 2735 - RNA, 23 nt, Artificial Sequence
  source: /note="Description of Artificial Sequence: Synthetic oligonucleotide"
ucaugcaagagcaaugguuuuca

SEQ ID NO: 2736 - DNA, 23 bp, Artificial Sequence
  source: /note="Description of Artificial Sequence: Synthetic oligonucleotide"
  source: /note="Description of Combined DNA/RNA Molecule: Synthetic oligonucleotide"
uaugtaacaugcaagagcaaugg

SEQ ID NO: 2737 - RNA, 23 nt, Artificial Sequence
  source: /note="Description of Artificial Sequence: Synthetic oligonucleotide"
ucauguaacaugcaagagcaaug

SEQ ID NO: 2738 - DNA, 23 bp, Artificial Sequence
  source: /note="Description of Artificial Sequence: Synthetic oligonucleotide"
  source: /note="Description of Combined DNA/RNA Molecule: Synthetic oligonucleotide"
uaaccatguaacatgcaagagca

SEQ ID NO: 2739 - DNA, 23 bp, Artificial Sequence
  source: /note="Description of Artificial Sequence: Synthetic oligonucleotide"
  source: /note="Description of Combined DNA/RNA Molecule: Synthetic oligonucleotide"
utaaccauguaacaugcaagagc

SEQ ID NO: 2740 - DNA, 23 bp, Artificial Sequence
  source: /note="Description of Artificial Sequence: Synthetic oligonucleotide"
  source: /note="Description of Combined DNA/RNA Molecule: Synthetic oligonucleotide"
uccutuagaagtuaugcuuuuua

SEQ ID NO: 2741 - DNA, 23 bp, Artificial Sequence
  source: /note="Description of Artificial Sequence: Synthetic oligonucleotide"
  source: /note="Description of Combined DNA/RNA Molecule: Synthetic oligonucleotide"
utcctutagaagutaugcuuuuu

SEQ ID NO: 2742 - DNA, 23 bp, Artificial Sequence
  source: /note="Description of Artificial Sequence: Synthetic oligonucleotide"
  source: /note="Description of Combined DNA/RNA Molecule: Synthetic oligonucleotide"
ugcuautcugctuccuuuagaag

SEQ ID NO: 2743 - DNA, 23 bp, Artificial Sequence
  source: /note="Description of Artificial Sequence: Synthetic oligonucleotide"
  source: /note="Description of Combined DNA/RNA Molecule: Synthetic oligonucleotide"
uagctatucugcutccuuuagaa

SEQ ID NO: 2744 - DNA, 23 bp, Artificial Sequence
  source: /note="Description of Artificial Sequence: Synthetic oligonucleotide"
  source: /note="Description of Combined DNA/RNA Molecule: Synthetic oligonucleotide"
uguaguaaaugcatcuuacuuau

SEQ ID NO: 2745 - RNA, 23 nt, Artificial Sequence
  source: /note="Description of Artificial Sequence: Synthetic oligonucleotide"
ucugaagcauuagaagccaacug

SEQ ID NO: 2746 - RNA, 23 nt, Artificial Sequence
  source: /note="Description of Artificial Sequence: Synthetic oligonucleotide"
uauucuaucugaagcauuagaag

SEQ ID NO: 2747 - DNA, 23 bp, Artificial Sequence
  source: /note="Description of Artificial Sequence: Synthetic oligonucleotide"
  source: /note="Description of Combined DNA/RNA Molecule: Synthetic oligonucleotide"
ucugtatucuatctgaagcauua

SEQ ID NO: 2748 - RNA, 23 nt, Artificial Sequence
  source: /note="Description of Artificial Sequence: Synthetic oligonucleotide"
ucaacuguauucuaucugaagca

SEQ ID NO: 2749 - DNA, 21 bp, Artificial Sequence
  source: /note="Description of Artificial Sequence: Synthetic oligonucleotide"
  source: /note="Description of Combined DNA/RNA Molecule: Synthetic oligonucleotide"
cagucccaaugaauccagctt

SEQ ID NO: 2750 - DNA, 21 bp, Artificial Sequence
  source: /note="Description of Artificial Sequence: Synthetic oligonucleotide"
  source: /note="Description of Combined DNA/RNA Molecule: Synthetic oligonucleotide"
agucccaaugaauccagcutt

SEQ ID NO: 2751 - RNA, 19 nt, Artificial Sequence
  source: /note="Description of Artificial Sequence: Synthetic oligonucleotide"
cagucccaaugaauccagc

SEQ ID NO: 2752 - RNA, 19 nt, Artificial Sequence
  source: /note="Description of Artificial Sequence: Synthetic oligonucleotide"
agucccaaugaauccagcu

SEQ ID NO: 2753 - RNA, 19 nt, Artificial Sequence
  source: /note="Description of Artificial Sequence: Synthetic oligonucleotide"
gucccaaugaauccagcug

SEQ ID NO: 2754 - RNA, 19 nt, Artificial Sequence
  source: /note="Description of Artificial Sequence: Synthetic oligonucleotide"
ccaugucagucauccauaa

SEQ ID NO: 2755 - RNA, 19 nt, Artificial Sequence
  source: /note="Description of Artificial Sequence: Synthetic oligonucleotide"
augucagucauccauaacu

SEQ ID NO: 2756 - RNA, 19 nt, Artificial Sequence
  source: /note="Description of Artificial Sequence: Synthetic oligonucleotide"
gcuggaaacccaaaccaga

SEQ ID NO: 2757 - RNA, 19 nt, Artificial Sequence
  source: /note="Description of Artificial Sequence: Synthetic oligonucleotide"
aaacccaaaccagagaguu

SEQ ID NO: 2758 - RNA, 19 nt, Artificial Sequence
  source: /note="Description of Artificial Sequence: Synthetic oligonucleotide"
aacccaaaccagagaguug

SEQ ID NO: 2759 - RNA, 19 nt, Artificial Sequence
  source: /note="Description of Artificial Sequence: Synthetic oligonucleotide"
ccgagacaagucaguucug

SEQ ID NO: 2760 - RNA, 19 nt, Artificial Sequence
  source: /note="Description of Artificial Sequence: Synthetic oligonucleotide"
gagacaagucaguucugga

SEQ ID NO: 2761 - RNA, 19 nt, Artificial Sequence
  source: /note="Description of Artificial Sequence: Synthetic oligonucleotide"
agacaagucaguucuggag

SEQ ID NO: 2762 - RNA, 19 nt, Artificial Sequence
  source: /note="Description of Artificial Sequence: Synthetic oligonucleotide"
caguucuggaggaagagaa

SEQ ID NO: 2763 - RNA, 19 nt, Artificial Sequence
  source: /note="Description of Artificial Sequence: Synthetic oligonucleotide"
aguucuggaggaagagaag

SEQ ID NO: 2764 - RNA, 19 nt, Artificial Sequence
  source: /note="Description of Artificial Sequence: Synthetic oligonucleotide"
ucuggaggaagagaagaag

SEQ ID NO: 2765 - RNA, 19 nt, Artificial Sequence
  source: /note="Description of Artificial Sequence: Synthetic oligonucleotide"
aggcuccagagaaguuucu

SEQ ID NO: 2766 - RNA, 19 nt, Artificial Sequence
  source: /note="Description of Artificial Sequence: Synthetic oligonucleotide"
ggcuccagagaaguuucua

SEQ ID NO: 2767 - RNA, 19 nt, Artificial Sequence
  source: /note="Description of Artificial Sequence: Synthetic oligonucleotide"
gcuccagagaaguuucuac

SEQ ID NO: 2768 - RNA, 19 nt, Artificial Sequence
  source: /note="Description of Artificial Sequence: Synthetic oligonucleotide"
cuccagagaaguuucuacg

SEQ ID NO: 2769 - RNA, 19 nt, Artificial Sequence
  source: /note="Description of Artificial Sequence: Synthetic oligonucleotide"
ugaaguccgagcuaacuga

SEQ ID NO: 2770 - RNA, 19 nt, Artificial Sequence
  source: /note="Description of Artificial Sequence: Synthetic oligonucleotide"
guccgagcuaacugaaguu

SEQ ID NO: 2771 - RNA, 19 nt, Artificial Sequence
  source: /note="Description of Artificial Sequence: Synthetic oligonucleotide"
uccgagcuaacugaaguuc

SEQ ID NO: 2772 - RNA, 19 nt, Artificial Sequence
  source: /note="Description of Artificial Sequence: Synthetic oligonucleotide"
ccgagcuaacugaaguucc

SEQ ID NO: 2773 - RNA, 19 nt, Artificial Sequence
  source: /note="Description of Artificial Sequence: Synthetic oligonucleotide"
cgagcuaacugaaguuccu

SEQ ID NO: 2774 - RNA, 19 nt, Artificial Sequence
  source: /note="Description of Artificial Sequence: Synthetic oligonucleotide"
gagcuaacugaaguuccug

SEQ ID NO: 2775 - RNA, 19 nt, Artificial Sequence
  source: /note="Description of Artificial Sequence: Synthetic oligonucleotide"
agcuaacugaaguuccugc

SEQ ID NO: 2776 - RNA, 19 nt, Artificial Sequence
  source: /note="Description of Artificial Sequence: Synthetic oligonucleotide"
gcuaacugaaguuccugcu

SEQ ID NO: 2777 - RNA, 19 nt, Artificial Sequence
  source: /note="Description of Artificial Sequence: Synthetic oligonucleotide"
guuccugcuucccgaauuu

SEQ ID NO: 2778 - RNA, 19 nt, Artificial Sequence
  source: /note="Description of Artificial Sequence: Synthetic oligonucleotide"
uuccugcuucccgaauuuu

SEQ ID NO: 2779 - RNA, 19 nt, Artificial Sequence
  source: /note="Description of Artificial Sequence: Synthetic oligonucleotide"
uccugcuucccgaauuuug

SEQ ID NO: 2780 - RNA, 19 nt, Artificial Sequence
  source: /note="Description of Artificial Sequence: Synthetic oligonucleotide"
ccugcuucccgaauuuuga

SEQ ID NO: 2781 - RNA, 19 nt, Artificial Sequence
  source: /note="Description of Artificial Sequence: Synthetic oligonucleotide"
cugcuucccgaauuuugaa

SEQ ID NO: 2782 - RNA, 19 nt, Artificial Sequence
  source: /note="Description of Artificial Sequence: Synthetic oligonucleotide"
ugcuucccgaauuuugaag

SEQ ID NO: 2783 - RNA, 19 nt, Artificial Sequence
  source: /note="Description of Artificial Sequence: Synthetic oligonucleotide"
gcuucccgaauuuugaagg

SEQ ID NO: 2784 - RNA, 19 nt, Artificial Sequence
  source: /note="Description of Artificial Sequence: Synthetic oligonucleotide"
cuucccgaauuuugaagga

SEQ ID NO: 2785 - RNA, 19 nt, Artificial Sequence
  source: /note="Description of Artificial Sequence: Synthetic oligonucleotide"
uucccgaauuuugaaggag

SEQ ID NO: 2786 - RNA, 19 nt, Artificial Sequence
  source: /note="Description of Artificial Sequence: Synthetic oligonucleotide"
ucccgaauuuugaaggaga

SEQ ID NO: 2787 - RNA, 19 nt, Artificial Sequence
  source: /note="Description of Artificial Sequence: Synthetic oligonucleotide"
cccgaauuuugaaggagag

SEQ ID NO: 2788 - RNA, 19 nt, Artificial Sequence
  source: /note="Description of Artificial Sequence: Synthetic oligonucleotide"
cggauguggagaacuaguu

SEQ ID NO: 2789 - RNA, 19 nt, Artificial Sequence
  source: /note="Description of Artificial Sequence: Synthetic oligonucleotide"
ggauguggagaacuaguuu

SEQ ID NO: 2790 - RNA, 19 nt, Artificial Sequence
  source: /note="Description of Artificial Sequence: Synthetic oligonucleotide"
gauguggagaacuaguuug

SEQ ID NO: 2791 - RNA, 19 nt, Artificial Sequence
  source: /note="Description of Artificial Sequence: Synthetic oligonucleotide"
auguggagaacuaguuugg

SEQ ID NO: 2792 - RNA, 19 nt, Artificial Sequence
  source: /note="Description of Artificial Sequence: Synthetic oligonucleotide"
uguggagaacuaguuuggg

SEQ ID NO: 2793 - RNA, 19 nt, Artificial Sequence
  source: /note="Description of Artificial Sequence: Synthetic oligonucleotide"
guggagaacuaguuugggu

SEQ ID NO: 2794 - RNA, 19 nt, Artificial Sequence
  source: /note="Description of Artificial Sequence: Synthetic oligonucleotide"
uggagaacuaguuugggua

SEQ ID NO: 2795 - RNA, 19 nt, Artificial Sequence
  source: /note="Description of Artificial Sequence: Synthetic oligonucleotide"
ggagaacuaguuuggguag

SEQ ID NO: 2796 - RNA, 19 nt, Artificial Sequence
  source: /note="Description of Artificial Sequence: Synthetic oligonucleotide"
gagaacuaguuuggguagg

SEQ ID NO: 2797 - RNA, 19 nt, Artificial Sequence
  source: /note="Description of Artificial Sequence: Synthetic oligonucleotide"
acgcugagaacagcagaaa

SEQ ID NO: 2798 - RNA, 19 nt, Artificial Sequence
  source: /note="Description of Artificial Sequence: Synthetic oligonucleotide"
gcugagaacagcagaaaca

SEQ ID NO: 2799 - RNA, 19 nt, Artificial Sequence
  source: /note="Description of Artificial Sequence: Synthetic oligonucleotide"
cugagaacagcagaaacaa

SEQ ID NO: 2800 - RNA, 19 nt, Artificial Sequence
  source: /note="Description of Artificial Sequence: Synthetic oligonucleotide"
ugagaacagcagaaacaau

SEQ ID NO: 2801 - RNA, 19 nt, Artificial Sequence
  source: /note="Description of Artificial Sequence: Synthetic oligonucleotide"
gagaacagcagaaacaauu

SEQ ID NO: 2802 - RNA, 19 nt, Artificial Sequence
  source: /note="Description of Artificial Sequence: Synthetic oligonucleotide"
agaacagcagaaacaauua

SEQ ID NO: 2803 - RNA, 19 nt, Artificial Sequence
  source: /note="Description of Artificial Sequence: Synthetic oligonucleotide"
gaacagcagaaacaauuac

SEQ ID NO: 2804 - RNA, 19 nt, Artificial Sequence
  source: /note="Description of Artificial Sequence: Synthetic oligonucleotide"
aacagcagaaacaauuacu

SEQ ID NO: 2805 - RNA, 19 nt, Artificial Sequence
  source: /note="Description of Artificial Sequence: Synthetic oligonucleotide"
acagcagaaacaauuacug

SEQ ID NO: 2806 - RNA, 19 nt, Artificial Sequence
  source: /note="Description of Artificial Sequence: Synthetic oligonucleotide"
cagcagaaacaauuacugg

SEQ ID NO: 2807 - RNA, 19 nt, Artificial Sequence
  source: /note="Description of Artificial Sequence: Synthetic oligonucleotide"
agcagaaacaauuacuggc

SEQ ID NO: 2808 - RNA, 19 nt, Artificial Sequence
  source: /note="Description of Artificial Sequence: Synthetic oligonucleotide"
gcagaaacaauuacuggca

SEQ ID NO: 2809 - RNA, 19 nt, Artificial Sequence
  source: /note="Description of Artificial Sequence: Synthetic oligonucleotide"
cagaaacaauuacuggcaa

SEQ ID NO: 2810 - RNA, 19 nt, Artificial Sequence
  source: /note="Description of Artificial Sequence: Synthetic oligonucleotide"
agaaacaauuacuggcaag

SEQ ID NO: 2811 - RNA, 19 nt, Artificial Sequence
  source: /note="Description of Artificial Sequence: Synthetic oligonucleotide"
gaaacaauuacuggcaagu

SEQ ID NO: 2812 - RNA, 19 nt, Artificial Sequence
  source: /note="Description of Artificial Sequence: Synthetic oligonucleotide"
aacaauuacuggcaaguau

SEQ ID NO: 2813 - RNA, 19 nt, Artificial Sequence
  source: /note="Description of Artificial Sequence: Synthetic oligonucleotide"
acaauuacuggcaaguaug

SEQ ID NO: 2814 - RNA, 19 nt, Artificial Sequence
  source: /note="Description of Artificial Sequence: Synthetic oligonucleotide"
caauuacuggcaaguaugg

SEQ ID NO: 2815 - RNA, 19 nt, Artificial Sequence
  source: /note="Description of Artificial Sequence: Synthetic oligonucleotide"
aauuacuggcaaguauggu

SEQ ID NO: 2816 - RNA, 19 nt, Artificial Sequence
  source: /note="Description of Artificial Sequence: Synthetic oligonucleotide"
uacuggcaaguauggugug

SEQ ID NO: 2817 - RNA, 19 nt, Artificial Sequence
  source: /note="Description of Artificial Sequence: Synthetic oligonucleotide"
auguccgccagguuuuuga

SEQ ID NO: 2818 - RNA, 19 nt, Artificial Sequence
  source: /note="Description of Artificial Sequence: Synthetic oligonucleotide"
uguccgccagguuuuugag

SEQ ID NO: 2819 - RNA, 19 nt, Artificial Sequence
  source: /note="Description of Artificial Sequence: Synthetic oligonucleotide"
guccgccagguuuuugagu

SEQ ID NO: 2820 - RNA, 19 nt, Artificial Sequence
  source: /note="Description of Artificial Sequence: Synthetic oligonucleotide"
uccgccagguuuuugagua

SEQ ID NO: 2821 - RNA, 19 nt, Artificial Sequence
  source: /note="Description of Artificial Sequence: Synthetic oligonucleotide"
ccgccagguuuuugaguau

SEQ ID NO: 2822 - RNA, 19 nt, Artificial Sequence
  source: /note="Description of Artificial Sequence: Synthetic oligonucleotide"
cgccagguuuuugaguaug

SEQ ID NO: 2823 - RNA, 19 nt, Artificial Sequence
  source: /note="Description of Artificial Sequence: Synthetic oligonucleotide"
gccagguuuuugaguauga

SEQ ID NO: 2824 - RNA, 19 nt, Artificial Sequence
  source: /note="Description of Artificial Sequence: Synthetic oligonucleotide"
ccagguuuuugaguaugac

SEQ ID NO: 2825 - RNA, 19 nt, Artificial Sequence
  source: /note="Description of Artificial Sequence: Synthetic oligonucleotide"
cagguuuuugaguaugacc

SEQ ID NO: 2826 - RNA, 19 nt, Artificial Sequence
  source: /note="Description of Artificial Sequence: Synthetic oligonucleotide"
agguuuuugaguaugaccu

SEQ ID NO: 2827 - RNA, 19 nt, Artificial Sequence
  source: /note="Description of Artificial Sequence: Synthetic oligonucleotide"
gguuuuugaguaugaccuc

SEQ ID NO: 2828 - RNA, 19 nt, Artificial Sequence
  source: /note="Description of Artificial Sequence: Synthetic oligonucleotide"
guuuuugaguaugaccuca

SEQ ID NO: 2829 - RNA, 19 nt, Artificial Sequence
  source: /note="Description of Artificial Sequence: Synthetic oligonucleotide"
gaccucaucagccaguuua

SEQ ID NO: 2830 - RNA, 19 nt, Artificial Sequence
  source: /note="Description of Artificial Sequence: Synthetic oligonucleotide"
accucaucagccaguuuau

SEQ ID NO: 2831 - RNA, 19 nt, Artificial Sequence
  source: /note="Description of Artificial Sequence: Synthetic oligonucleotide"
ccucaucagccaguuuaug

SEQ ID NO: 2832 - RNA, 19 nt, Artificial Sequence
  source: /note="Description of Artificial Sequence: Synthetic oligonucleotide"
cucaucagccaguuuaugc

SEQ ID NO: 2833 - RNA, 19 nt, Artificial Sequence
  source: /note="Description of Artificial Sequence: Synthetic oligonucleotide"
ucaucagccaguuuaugca

SEQ ID NO: 2834 - RNA, 19 nt, Artificial Sequence
  source: /note="Description of Artificial Sequence: Synthetic oligonucleotide"
ucagccaguuuaugcaggg

SEQ ID NO: 2835 - RNA, 19 nt, Artificial Sequence
  source: /note="Description of Artificial Sequence: Synthetic oligonucleotide"
ggcuacccuucuaagguuc

SEQ ID NO: 2836 - RNA, 19 nt, Artificial Sequence
  source: /note="Description of Artificial Sequence: Synthetic oligonucleotide"
gcuacccuucuaagguuca

SEQ ID NO: 2837 - RNA, 19 nt, Artificial Sequence
  source: /note="Description of Artificial Sequence: Synthetic oligonucleotide"
cuacccuucuaagguucac

SEQ ID NO: 2838 - RNA, 19 nt, Artificial Sequence
  source: /note="Description of Artificial Sequence: Synthetic oligonucleotide"
uacccuucuaagguucaca

SEQ ID NO: 2839 - RNA, 19 nt, Artificial Sequence
  source: /note="Description of Artificial Sequence: Synthetic oligonucleotide"
acccuucuaagguucacau

SEQ ID NO: 2840 - RNA, 19 nt, Artificial Sequence
  source: /note="Description of Artificial Sequence: Synthetic oligonucleotide"
cccuucuaagguucacaua

SEQ ID NO: 2841 - RNA, 19 nt, Artificial Sequence
  source: /note="Description of Artificial Sequence: Synthetic oligonucleotide"
ccuucuaagguucacauac

SEQ ID NO: 2842 - RNA, 19 nt, Artificial Sequence
  source: /note="Description of Artificial Sequence: Synthetic oligonucleotide"
cuucuaagguucacauacu

SEQ ID NO: 2843 - RNA, 19 nt, Artificial Sequence
  source: /note="Description of Artificial Sequence: Synthetic oligonucleotide"
uucuaagguucacauacug

SEQ ID NO: 2844 - RNA, 19 nt, Artificial Sequence
  source: /note="Description of Artificial Sequence: Synthetic oligonucleotide"
cuaagguucacauacugcc

SEQ ID NO: 2845 - RNA, 19 nt, Artificial Sequence
  source: /note="Description of Artificial Sequence: Synthetic oligonucleotide"
uaagguucacauacugccu

SEQ ID NO: 2846 - RNA, 19 nt, Artificial Sequence
  source: /note="Description of Artificial Sequence: Synthetic oligonucleotide"
gaguccagaacugucauaa

SEQ ID NO: 2847 - RNA, 19 nt, Artificial Sequence
  source: /note="Description of Artificial Sequence: Synthetic oligonucleotide"
aguccagaacugucauaag

SEQ ID NO: 2848 - RNA, 19 nt, Artificial Sequence
  source: /note="Description of Artificial Sequence: Synthetic oligonucleotide"
guccagaacugucauaaga

SEQ ID NO: 2849 - RNA, 19 nt, Artificial Sequence
  source: /note="Description of Artificial Sequence: Synthetic oligonucleotide"
uccagaacugucauaagau

SEQ ID NO: 2850 - RNA, 19 nt, Artificial Sequence
  source: /note="Description of Artificial Sequence: Synthetic oligonucleotide"
ccagaacugucauaagaua

SEQ ID NO: 2851 - RNA, 19 nt, Artificial Sequence
  source: /note="Description of Artificial Sequence: Synthetic oligonucleotide"
cagaacugucauaagauau

SEQ ID NO: 2852 - RNA, 19 nt, Artificial Sequence
  source: /note="Description of Artificial Sequence: Synthetic oligonucleotide"
agaacugucauaagauaug

SEQ ID NO: 2853 - RNA, 19 nt, Artificial Sequence
  source: /note="Description of Artificial Sequence: Synthetic oligonucleotide"
gaacugucauaagauauga

SEQ ID NO: 2854 - RNA, 19 nt, Artificial Sequence
  source: /note="Description of Artificial Sequence: Synthetic oligonucleotide"
aacugucauaagauaugag

SEQ ID NO: 2855 - RNA, 19 nt, Artificial Sequence
  source: /note="Description of Artificial Sequence: Synthetic oligonucleotide"
acugucauaagauaugagc

SEQ ID NO: 2856 - RNA, 19 nt, Artificial Sequence
  source: /note="Description of Artificial Sequence: Synthetic oligonucleotide"
cugucauaagauaugagcu

SEQ ID NO: 2857 - RNA, 19 nt, Artificial Sequence
  source: /note="Description of Artificial Sequence: Synthetic oligonucleotide"
ugucauaagauaugagcug

SEQ ID NO: 2858 - RNA, 19 nt, Artificial Sequence
  source: /note="Description of Artificial Sequence: Synthetic oligonucleotide"
gucauaagauaugagcuga

SEQ ID NO: 2859 - RNA, 19 nt, Artificial Sequence
  source: /note="Description of Artificial Sequence: Synthetic oligonucleotide"
aagauaugagcugaauacc

SEQ ID NO: 2860 - RNA, 19 nt, Artificial Sequence
  source: /note="Description of Artificial Sequence: Synthetic oligonucleotide"
ugaauaccgagacagugaa

SEQ ID NO: 2861 - RNA, 19 nt, Artificial Sequence
  source: /note="Description of Artificial Sequence: Synthetic oligonucleotide"
ugaaggcugagaaggaaau

SEQ ID NO: 2862 - RNA, 19 nt, Artificial Sequence
  source: /note="Description of Artificial Sequence: Synthetic oligonucleotide"
ggcugagaaggaaaucccu

SEQ ID NO: 2863 - RNA, 19 nt, Artificial Sequence
  source: /note="Description of Artificial Sequence: Synthetic oligonucleotide"
cggacaguucccguauucu

SEQ ID NO: 2864 - RNA, 19 nt, Artificial Sequence
  source: /note="Description of Artificial Sequence: Synthetic oligonucleotide"
ggacaguucccguauucuu

SEQ ID NO: 2865 - RNA, 19 nt, Artificial Sequence
  source: /note="Description of Artificial Sequence: Synthetic oligonucleotide"
gacaguucccguauucuug

SEQ ID NO: 2866 - RNA, 19 nt, Artificial Sequence
  source: /note="Description of Artificial Sequence: Synthetic oligonucleotide"
acaguucccguauucuugg

SEQ ID NO: 2867 - RNA, 19 nt, Artificial Sequence
  source: /note="Description of Artificial Sequence: Synthetic oligonucleotide"
gccucugggucauuuacag

SEQ ID NO: 2868 - RNA, 19 nt, Artificial Sequence
  source: /note="Description of Artificial Sequence: Synthetic oligonucleotide"
ccauuguccucuccaaacu

SEQ ID NO: 2869 - RNA, 19 nt, Artificial Sequence
  source: /note="Description of Artificial Sequence: Synthetic oligonucleotide"
cauuguccucuccaaacug

SEQ ID NO: 2870 - RNA, 19 nt, Artificial Sequence
  source: /note="Description of Artificial Sequence: Synthetic oligonucleotide"
auuguccucuccaaacuga

SEQ ID NO: 2871 - RNA, 19 nt, Artificial Sequence
  source: /note="Description of Artificial Sequence: Synthetic oligonucleotide"
uuguccucuccaaacugaa

SEQ ID NO: 2872 - RNA, 19 nt, Artificial Sequence
  source: /note="Description of Artificial Sequence: Synthetic oligonucleotide"
ucuccaaacugaacccaga

SEQ ID NO: 2873 - RNA, 19 nt, Artificial Sequence
  source: /note="Description of Artificial Sequence: Synthetic oligonucleotide"
caaacugaacccagagaau

SEQ ID NO: 2874 - RNA, 19 nt, Artificial Sequence
  source: /note="Description of Artificial Sequence: Synthetic oligonucleotide"
aaacugaacccagagaauc

SEQ ID NO: 2875 - RNA, 19 nt, Artificial Sequence
  source: /note="Description of Artificial Sequence: Synthetic oligonucleotide"
cccagagaaucuggaacuc

SEQ ID NO: 2876 - RNA, 19 nt, Artificial Sequence
  source: /note="Description of Artificial Sequence: Synthetic oligonucleotide"
gucgccaaugccuucauca

SEQ ID NO: 2877 - RNA, 19 nt, Artificial Sequence
  source: /note="Description of Artificial Sequence: Synthetic oligonucleotide"
ccaaugccuucaucaucug

SEQ ID NO: 2878 - RNA, 19 nt, Artificial Sequence
  source: /note="Description of Artificial Sequence: Synthetic oligonucleotide"
aaugccuucaucaucugug

SEQ ID NO: 2879 - RNA, 19 nt, Artificial Sequence
  source: /note="Description of Artificial Sequence: Synthetic oligonucleotide"
augccuucaucaucugugg

SEQ ID NO: 2880 - RNA, 19 nt, Artificial Sequence
  source: /note="Description of Artificial Sequence: Synthetic oligonucleotide"
guggcaccuuguacaccgu

SEQ ID NO: 2881 - RNA, 19 nt, Artificial Sequence
  source: /note="Description of Artificial Sequence: Synthetic oligonucleotide"
accgucaacuuugcuuaug

SEQ ID NO: 2882 - RNA, 19 nt, Artificial Sequence
  source: /note="Description of Artificial Sequence: Synthetic oligonucleotide"
ccgucaacuuugcuuauga

SEQ ID NO: 2883 - RNA, 19 nt, Artificial Sequence
  source: /note="Description of Artificial Sequence: Synthetic oligonucleotide"
cgucaacuuugcuuaugac

SEQ ID NO: 2884 - RNA, 19 nt, Artificial Sequence
  source: /note="Description of Artificial Sequence: Synthetic oligonucleotide"
gucaacuuugcuuaugaca

SEQ ID NO: 2885 - RNA, 19 nt, Artificial Sequence
  source: /note="Description of Artificial Sequence: Synthetic oligonucleotide"
ucaacuuugcuuaugacac

SEQ ID NO: 2886 - RNA, 19 nt, Artificial Sequence
  source: /note="Description of Artificial Sequence: Synthetic oligonucleotide"
cccugaccaucccauucaa

SEQ ID NO: 2887 - RNA, 19 nt, Artificial Sequence
  source: /note="Description of Artificial Sequence: Synthetic oligonucleotide"
ccugaccaucccauucaag

SEQ ID NO: 2888 - RNA, 19 nt, Artificial Sequence
  source: /note="Description of Artificial Sequence: Synthetic oligonucleotide"
cugaccaucccauucaaga

SEQ ID NO: 2889 - RNA, 19 nt, Artificial Sequence
  source: /note="Description of Artificial Sequence: Synthetic oligonucleotide"
ccaucccauucaagaaccg

SEQ ID NO: 2890 - RNA, 19 nt, Artificial Sequence
  source: /note="Description of Artificial Sequence: Synthetic oligonucleotide"
aucccauucaagaaccgcu

SEQ ID NO: 2891 - RNA, 19 nt, Artificial Sequence
  source: /note="Description of Artificial Sequence: Synthetic oligonucleotide"
ucccauucaagaaccgcua

SEQ ID NO: 2892 - RNA, 19 nt, Artificial Sequence
  source: /note="Description of Artificial Sequence: Synthetic oligonucleotide"
cccauucaagaaccgcuau

SEQ ID NO: 2893 - RNA, 19 nt, Artificial Sequence
  source: /note="Description of Artificial Sequence: Synthetic oligonucleotide"
aaguacagcagcaugauug

SEQ ID NO: 2894 - RNA, 19 nt, Artificial Sequence
  source: /note="Description of Artificial Sequence: Synthetic oligonucleotide"
aguacagcagcaugauuga

SEQ ID NO: 2895 - RNA, 19 nt, Artificial Sequence
  source: /note="Description of Artificial Sequence: Synthetic oligonucleotide"
acagcagcaugauugacua

SEQ ID NO: 2896 - RNA, 19 nt, Artificial Sequence
  source: /note="Description of Artificial Sequence: Synthetic oligonucleotide"
cagcagcaugauugacuac

SEQ ID NO: 2897 - RNA, 19 nt, Artificial Sequence
  source: /note="Description of Artificial Sequence: Synthetic oligonucleotide"
agcagcaugauugacuaca

SEQ ID NO: 2898 - RNA, 19 nt, Artificial Sequence
  source: /note="Description of Artificial Sequence: Synthetic oligonucleotide"
gcagcaugauugacuacaa

SEQ ID NO: 2899 - RNA, 19 nt, Artificial Sequence
  source: /note="Description of Artificial Sequence: Synthetic oligonucleotide"
cagcaugauugacuacaac

SEQ ID NO: 2900 - RNA, 19 nt, Artificial Sequence
  source: /note="Description of Artificial Sequence: Synthetic oligonucleotide"
agcaugauugacuacaacc

SEQ ID NO: 2901 - RNA, 19 nt, Artificial Sequence
  source: /note="Description of Artificial Sequence: Synthetic oligonucleotide"
gcaugauugacuacaaccc

SEQ ID NO: 2902 - RNA, 19 nt, Artificial Sequence
  source: /note="Description of Artificial Sequence: Synthetic oligonucleotide"
ucuuugccugggacaacuu

SEQ ID NO: 2903 - RNA, 19 nt, Artificial Sequence
  source: /note="Description of Artificial Sequence: Synthetic oligonucleotide"
uugccugggacaacuugaa

SEQ ID NO: 2904 - RNA, 19 nt, Artificial Sequence
  source: /note="Description of Artificial Sequence: Synthetic oligonucleotide"
ccugggacaacuugaacau

SEQ ID NO: 2905 - RNA, 19 nt, Artificial Sequence
  source: /note="Description of Artificial Sequence: Synthetic oligonucleotide"
cugggacaacuugaacaug

SEQ ID NO: 2906 - RNA, 19 nt, Artificial Sequence
  source: /note="Description of Artificial Sequence: Synthetic oligonucleotide"
ugggacaacuugaacaugg

SEQ ID NO: 2907 - RNA, 19 nt, Artificial Sequence
  source: /note="Description of Artificial Sequence: Synthetic oligonucleotide"
gggacaacuugaacauggu

SEQ ID NO: 2908 - RNA, 19 nt, Artificial Sequence
  source: /note="Description of Artificial Sequence: Synthetic oligonucleotide"
ggacaacuugaacaugguc

SEQ ID NO: 2909 - RNA, 19 nt, Artificial Sequence
  source: /note="Description of Artificial Sequence: Synthetic oligonucleotide"
gacaacuugaacaugguca

SEQ ID NO: 2910 - RNA, 19 nt, Artificial Sequence
  source: /note="Description of Artificial Sequence: Synthetic oligonucleotide"
acaacuugaacauggucac

SEQ ID NO: 2911 - RNA, 19 nt, Artificial Sequence
  source: /note="Description of Artificial Sequence: Synthetic oligonucleotide"
caacuugaacauggucacu

SEQ ID NO: 2912 - RNA, 19 nt, Artificial Sequence
  source: /note="Description of Artificial Sequence: Synthetic oligonucleotide"
acuugaacauggucacuua

SEQ ID NO: 2913 - RNA, 19 nt, Artificial Sequence
  source: /note="Description of Artificial Sequence: Synthetic oligonucleotide"
cuugaacauggucacuuau

SEQ ID NO: 2914 - RNA, 19 nt, Artificial Sequence
  source: /note="Description of Artificial Sequence: Synthetic oligonucleotide"
uugaacauggucacuuaug

SEQ ID NO: 2915 - RNA, 19 nt, Artificial Sequence
  source: /note="Description of Artificial Sequence: Synthetic oligonucleotide"
ugaacauggucacuuauga

SEQ ID NO: 2916 - RNA, 19 nt, Artificial Sequence
  source: /note="Description of Artificial Sequence: Synthetic oligonucleotide"
gaacauggucacuuaugac

SEQ ID NO: 2917 - RNA, 19 nt, Artificial Sequence
  source: /note="Description of Artificial Sequence: Synthetic oligonucleotide"
aacauggucacuuaugaca

SEQ ID NO: 2918 - RNA, 19 nt, Artificial Sequence
  source: /note="Description of Artificial Sequence: Synthetic oligonucleotide"
acauggucacuuaugacau

SEQ ID NO: 2919 - RNA, 19 nt, Artificial Sequence
  source: /note="Description of Artificial Sequence: Synthetic oligonucleotide"
cauggucacuuaugacauc

SEQ ID NO: 2920 - RNA, 19 nt, Artificial Sequence
  source: /note="Description of Artificial Sequence: Synthetic oligonucleotide"
uggucacuuaugacaucaa

SEQ ID NO: 2921 - RNA, 19 nt, Artificial Sequence
  source: /note="Description of Artificial Sequence: Synthetic oligonucleotide"
ggucacuuaugacaucaag

SEQ ID NO: 2922 - RNA, 19 nt, Artificial Sequence
  source: /note="Description of Artificial Sequence: Synthetic oligonucleotide"
gucacuuaugacaucaagc

SEQ ID NO: 2923 - RNA, 19 nt, Artificial Sequence
  source: /note="Description of Artificial Sequence: Synthetic oligonucleotide"
acaucaagcucuccaagau

SEQ ID NO: 2924 - RNA, 19 nt, Artificial Sequence
  source: /note="Description of Artificial Sequence: Synthetic oligonucleotide"
aucaagcucuccaagaugu

SEQ ID NO: 2925 - RNA, 19 nt, Artificial Sequence
  source: /note="Description of Artificial Sequence: Synthetic oligonucleotide"
ucaagcucuccaagaugug

SEQ ID NO: 2926 - RNA, 19 nt, Artificial Sequence
  source: /note="Description of Artificial Sequence: Synthetic oligonucleotide"
agcucuccaagaugugaaa

SEQ ID NO: 2927 - RNA, 19 nt, Artificial Sequence
  source: /note="Description of Artificial Sequence: Synthetic oligonucleotide"
gcucuccaagaugugaaaa

SEQ ID NO: 2928 - RNA, 19 nt, Artificial Sequence
  source: /note="Description of Artificial Sequence: Synthetic oligonucleotide"
cucuccaagaugugaaaag

SEQ ID NO: 2929 - RNA, 19 nt, Artificial Sequence
  source: /note="Description of Artificial Sequence: Synthetic oligonucleotide"
ucuccaagaugugaaaagc

SEQ ID NO: 2930 - RNA, 19 nt, Artificial Sequence
  source: /note="Description of Artificial Sequence: Synthetic oligonucleotide"
uccaagaugugaaaagccu

SEQ ID NO: 2931 - RNA, 19 nt, Artificial Sequence
  source: /note="Description of Artificial Sequence: Synthetic oligonucleotide"
ccaagaugugaaaagccuc

SEQ ID NO: 2932 - RNA, 19 nt, Artificial Sequence
  source: /note="Description of Artificial Sequence: Synthetic oligonucleotide"
ggaugaacauggucaccau

SEQ ID NO: 2933 - RNA, 19 nt, Artificial Sequence
  source: /note="Description of Artificial Sequence: Synthetic oligonucleotide"
caggaauuguagucugagg

SEQ ID NO: 2934 - RNA, 19 nt, Artificial Sequence
  source: /note="Description of Artificial Sequence: Synthetic oligonucleotide"
aggaauuguagucugaggg

SEQ ID NO: 2935 - RNA, 19 nt, Artificial Sequence
  source: /note="Description of Artificial Sequence: Synthetic oligonucleotide"
ucuucugucagcauuuaug

SEQ ID NO: 2936 - RNA, 19 nt, Artificial Sequence
  source: /note="Description of Artificial Sequence: Synthetic oligonucleotide"
cuucugucagcauuuaugg

SEQ ID NO: 2937 - RNA, 19 nt, Artificial Sequence
  source: /note="Description of Artificial Sequence: Synthetic oligonucleotide"
uucugucagcauuuauggg

SEQ ID NO: 2938 - RNA, 19 nt, Artificial Sequence
  source: /note="Description of Artificial Sequence: Synthetic oligonucleotide"
cugucagcauuuaugggau

SEQ ID NO: 2939 - RNA, 19 nt, Artificial Sequence
  source: /note="Description of Artificial Sequence: Synthetic oligonucleotide"
ugucagcauuuaugggaug

SEQ ID NO: 2940 - RNA, 19 nt, Artificial Sequence
  source: /note="Description of Artificial Sequence: Synthetic oligonucleotide"
gucagcauuuaugggaugu

SEQ ID NO: 2941 - RNA, 19 nt, Artificial Sequence
  source: /note="Description of Artificial Sequence: Synthetic oligonucleotide"
ucagcauuuaugggauguu

SEQ ID NO: 2942 - RNA, 19 nt, Artificial Sequence
  source: /note="Description of Artificial Sequence: Synthetic oligonucleotide"
cagcauuuaugggauguuu

SEQ ID NO: 2943 - RNA, 19 nt, Artificial Sequence
  source: /note="Description of Artificial Sequence: Synthetic oligonucleotide"
agcauuuaugggauguuua

SEQ ID NO: 2944 - RNA, 19 nt, Artificial Sequence
  source: /note="Description of Artificial Sequence: Synthetic oligonucleotide"
gcauuuaugggauguuuaa

SEQ ID NO: 2945 - RNA, 19 nt, Artificial Sequence
  source: /note="Description of Artificial Sequence: Synthetic oligonucleotide"
cauuuaugggauguuuaau

SEQ ID NO: 2946 - RNA, 19 nt, Artificial Sequence
  source: /note="Description of Artificial Sequence: Synthetic oligonucleotide"
auuuaugggauguuuaaug

SEQ ID NO: 2947 - RNA, 19 nt, Artificial Sequence
  source: /note="Description of Artificial Sequence: Synthetic oligonucleotide"
uuuaugggauguuuaauga

SEQ ID NO: 2948 - RNA, 19 nt, Artificial Sequence
  source: /note="Description of Artificial Sequence: Synthetic oligonucleotide"
uuaugggauguuuaaugac

SEQ ID NO: 2949 - RNA, 19 nt, Artificial Sequence
  source: /note="Description of Artificial Sequence: Synthetic oligonucleotide"
augggauguuuaaugacau

SEQ ID NO: 2950 - RNA, 19 nt, Artificial Sequence
  source: /note="Description of Artificial Sequence: Synthetic oligonucleotide"
ugggauguuuaaugacaua

SEQ ID NO: 2951 - RNA, 19 nt, Artificial Sequence
  source: /note="Description of Artificial Sequence: Synthetic oligonucleotide"
gggauguuuaaugacauag

SEQ ID NO: 2952 - RNA, 19 nt, Artificial Sequence
  source: /note="Description of Artificial Sequence: Synthetic oligonucleotide"
ggauguuuaaugacauagu

SEQ ID NO: 2953 - RNA, 19 nt, Artificial Sequence
  source: /note="Description of Artificial Sequence: Synthetic oligonucleotide"
gauguuuaaugacauaguu

SEQ ID NO: 2954 - RNA, 19 nt, Artificial Sequence
  source: /note="Description of Artificial Sequence: Synthetic oligonucleotide"
auguuuaaugacauaguuc

SEQ ID NO: 2955 - RNA, 19 nt, Artificial Sequence
  source: /note="Description of Artificial Sequence: Synthetic oligonucleotide"
uguuuaaugacauaguuca

SEQ ID NO: 2956 - RNA, 19 nt, Artificial Sequence
  source: /note="Description of Artificial Sequence: Synthetic oligonucleotide"
guuuaaugacauaguucaa

SEQ ID NO: 2957 - RNA, 19 nt, Artificial Sequence
  source: /note="Description of Artificial Sequence: Synthetic oligonucleotide"
uuuaaugacauaguucaag

SEQ ID NO: 2958 - RNA, 19 nt, Artificial Sequence
  source: /note="Description of Artificial Sequence: Synthetic oligonucleotide"
uuaaugacauaguucaagu

SEQ ID NO: 2959 - RNA, 19 nt, Artificial Sequence
  source: /note="Description of Artificial Sequence: Synthetic oligonucleotide"
uaaugacauaguucaaguu

SEQ ID NO: 2960 - RNA, 19 nt, Artificial Sequence
  source: /note="Description of Artificial Sequence: Synthetic oligonucleotide"
aaugacauaguucaaguuu

SEQ ID NO: 2961 - RNA, 19 nt, Artificial Sequence
  source: /note="Description of Artificial Sequence: Synthetic oligonucleotide"
augacauaguucaaguuuu

SEQ ID NO: 2962 - RNA, 19 nt, Artificial Sequence
  source: /note="Description of Artificial Sequence: Synthetic oligonucleotide"
ugacauaguucaaguuuuc

SEQ ID NO: 2963 - RNA, 19 nt, Artificial Sequence
  source: /note="Description of Artificial Sequence: Synthetic oligonucleotide"
gacauaguucaaguuuucu

SEQ ID NO: 2964 - RNA, 19 nt, Artificial Sequence
  source: /note="Description of Artificial Sequence: Synthetic oligonucleotide"
acauaguucaaguuuucuu

SEQ ID NO: 2965 - RNA, 19 nt, Artificial Sequence
  source: /note="Description of Artificial Sequence: Synthetic oligonucleotide"
cauaguucaaguuuucuug

SEQ ID NO: 2966 - RNA, 19 nt, Artificial Sequence
  source: /note="Description of Artificial Sequence: Synthetic oligonucleotide"
auaguucaaguuuucuugu

SEQ ID NO: 2967 - RNA, 19 nt, Artificial Sequence
  source: /note="Description of Artificial Sequence: Synthetic oligonucleotide"
uaguucaaguuuucuugug

SEQ ID NO: 2968 - RNA, 19 nt, Artificial Sequence
  source: /note="Description of Artificial Sequence: Synthetic oligonucleotide"
aguucaaguuuucuuguga

SEQ ID NO: 2969 - RNA, 19 nt, Artificial Sequence
  source: /note="Description of Artificial Sequence: Synthetic oligonucleotide"
guucaaguuuucuugugau

SEQ ID NO: 2970 - RNA, 19 nt, Artificial Sequence
  source: /note="Description of Artificial Sequence: Synthetic oligonucleotide"
uucaaguuuucuugugauu

SEQ ID NO: 2971 - RNA, 19 nt, Artificial Sequence
  source: /note="Description of Artificial Sequence: Synthetic oligonucleotide"
ucaaguuuucuugugauuu

SEQ ID NO: 2972 - RNA, 19 nt, Artificial Sequence
  source: /note="Description of Artificial Sequence: Synthetic oligonucleotide"
caaguuuucuugugauuug

SEQ ID NO: 2973 - RNA, 19 nt, Artificial Sequence
  source: /note="Description of Artificial Sequence: Synthetic oligonucleotide"
aaguuuucuugugauuugg

SEQ ID NO: 2974 - RNA, 19 nt, Artificial Sequence
  source: /note="Description of Artificial Sequence: Synthetic oligonucleotide"
aguuuucuugugauuuggg

SEQ ID NO: 2975 - RNA, 19 nt, Artificial Sequence
  source: /note="Description of Artificial Sequence: Synthetic oligonucleotide"
guuuucuugugauuugggg

SEQ ID NO: 2976 - RNA, 19 nt, Artificial Sequence
  source: /note="Description of Artificial Sequence: Synthetic oligonucleotide"
ugugauuuggggcaaaagc

SEQ ID NO: 2977 - RNA, 19 nt, Artificial Sequence
  source: /note="Description of Artificial Sequence: Synthetic oligonucleotide"
gugauuuggggcaaaagcu

SEQ ID NO: 2978 - RNA, 19 nt, Artificial Sequence
  source: /note="Description of Artificial Sequence: Synthetic oligonucleotide"
ugauuuggggcaaaagcug

SEQ ID NO: 2979 - RNA, 19 nt, Artificial Sequence
  source: /note="Description of Artificial Sequence: Synthetic oligonucleotide"
uaguuucuuccugaaaacc

SEQ ID NO: 2980 - RNA, 19 nt, Artificial Sequence
  source: /note="Description of Artificial Sequence: Synthetic oligonucleotide"
aguuucuuccugaaaacca

SEQ ID NO: 2981 - RNA, 19 nt, Artificial Sequence
  source: /note="Description of Artificial Sequence: Synthetic oligonucleotide"
guuucuuccugaaaaccau

SEQ ID NO: 2982 - RNA, 19 nt, Artificial Sequence
  source: /note="Description of Artificial Sequence: Synthetic oligonucleotide"
uuucuuccugaaaaccauu

SEQ ID NO: 2983 - RNA, 19 nt, Artificial Sequence
  source: /note="Description of Artificial Sequence: Synthetic oligonucleotide"
uucuuccugaaaaccauug

SEQ ID NO: 2984 - RNA, 19 nt, Artificial Sequence
  source: /note="Description of Artificial Sequence: Synthetic oligonucleotide"
ucuuccugaaaaccauugc

SEQ ID NO: 2985 - RNA, 19 nt, Artificial Sequence
  source: /note="Description of Artificial Sequence: Synthetic oligonucleotide"
cuuccugaaaaccauugcu

SEQ ID NO: 2986 - RNA, 19 nt, Artificial Sequence
  source: /note="Description of Artificial Sequence: Synthetic oligonucleotide"
uuccugaaaaccauugcuc

SEQ ID NO: 2987 - RNA, 19 nt, Artificial Sequence
  source: /note="Description of Artificial Sequence: Synthetic oligonucleotide"
uccugaaaaccauugcucu

SEQ ID NO: 2988 - RNA, 19 nt, Artificial Sequence
  source: /note="Description of Artificial Sequence: Synthetic oligonucleotide"
ccugaaaaccauugcucuu

SEQ ID NO: 2989 - RNA, 19 nt, Artificial Sequence
  source: /note="Description of Artificial Sequence: Synthetic oligonucleotide"
cugaaaaccauugcucuug

SEQ ID NO: 2990 - RNA, 19 nt, Artificial Sequence
  source: /note="Description of Artificial Sequence: Synthetic oligonucleotide"
aaccauugcucuugcaugu

SEQ ID NO: 2991 - RNA, 19 nt, Artificial Sequence
  source: /note="Description of Artificial Sequence: Synthetic oligonucleotide"
ccauugcucuugcauguua

SEQ ID NO: 2992 - RNA, 19 nt, Artificial Sequence
  source: /note="Description of Artificial Sequence: Synthetic oligonucleotide"
cauugcucuugcauguuac

SEQ ID NO: 2993 - RNA, 19 nt, Artificial Sequence
  source: /note="Description of Artificial Sequence: Synthetic oligonucleotide"
auugcucuugcauguuaca

SEQ ID NO: 2994 - RNA, 19 nt, Artificial Sequence
  source: /note="Description of Artificial Sequence: Synthetic oligonucleotide"
uugcucuugcauguuacau

SEQ ID NO: 2995 - RNA, 19 nt, Artificial Sequence
  source: /note="Description of Artificial Sequence: Synthetic oligonucleotide"
ugcucuugcauguuacaug

SEQ ID NO: 2996 - RNA, 19 nt, Artificial Sequence
  source: /note="Description of Artificial Sequence: Synthetic oligonucleotide"
gcucuugcauguuacaugg

SEQ ID NO: 2997 - RNA, 19 nt, Artificial Sequence
  source: /note="Description of Artificial Sequence: Synthetic oligonucleotide"
cucuugcauguuacauggu

SEQ ID NO: 2998 - RNA, 19 nt, Artificial Sequence
  source: /note="Description of Artificial Sequence: Synthetic oligonucleotide"
ucuugcauguuacaugguu

SEQ ID NO: 2999 - RNA, 19 nt, Artificial Sequence
  source: /note="Description of Artificial Sequence: Synthetic oligonucleotide"
cuugcauguuacaugguua

SEQ ID NO: 3000 - RNA, 19 nt, Artificial Sequence
  source: /note="Description of Artificial Sequence: Synthetic oligonucleotide"
uugcauguuacaugguuac

SEQ ID NO: 3001 - RNA, 19 nt, Artificial Sequence
  source: /note="Description of Artificial Sequence: Synthetic oligonucleotide"
ugcauguuacaugguuacc

SEQ ID NO: 3002 - RNA, 19 nt, Artificial Sequence
  source: /note="Description of Artificial Sequence: Synthetic oligonucleotide"
gcauguuacaugguuacca

SEQ ID NO: 3003 - RNA, 19 nt, Artificial Sequence
  source: /note="Description of Artificial Sequence: Synthetic oligonucleotide"
auguuacaugguuaccaca

SEQ ID NO: 3004 - RNA, 19 nt, Artificial Sequence
  source: /note="Description of Artificial Sequence: Synthetic oligonucleotide"
uguuacaugguuaccacaa

SEQ ID NO: 3005 - RNA, 19 nt, Artificial Sequence
  source: /note="Description of Artificial Sequence: Synthetic oligonucleotide"
ugguuaccacaagccacaa

SEQ ID NO: 3006 - RNA, 19 nt, Artificial Sequence
  source: /note="Description of Artificial Sequence: Synthetic oligonucleotide"
gguuaccacaagccacaau

SEQ ID NO: 3007 - RNA, 19 nt, Artificial Sequence
  source: /note="Description of Artificial Sequence: Synthetic oligonucleotide"
guuaccacaagccacaaua

SEQ ID NO: 3008 - RNA, 19 nt, Artificial Sequence
  source: /note="Description of Artificial Sequence: Synthetic oligonucleotide"
aaaagcauaacuucuaaag

SEQ ID NO: 3009 - RNA, 19 nt, Artificial Sequence
  source: /note="Description of Artificial Sequence: Synthetic oligonucleotide"
aaagcauaacuucuaaagg

SEQ ID NO: 3010 - RNA, 19 nt, Artificial Sequence
  source: /note="Description of Artificial Sequence: Synthetic oligonucleotide"
aagcauaacuucuaaagga

SEQ ID NO: 3011 - RNA, 19 nt, Artificial Sequence
  source: /note="Description of Artificial Sequence: Synthetic oligonucleotide"
agcauaacuucuaaaggaa

SEQ ID NO: 3012 - RNA, 19 nt, Artificial Sequence
  source: /note="Description of Artificial Sequence: Synthetic oligonucleotide"
gcauaacuucuaaaggaag

SEQ ID NO: 3013 - RNA, 19 nt, Artificial Sequence
  source: /note="Description of Artificial Sequence: Synthetic oligonucleotide"
cauaacuucuaaaggaagc

SEQ ID NO: 3014 - RNA, 19 nt, Artificial Sequence
  source: /note="Description of Artificial Sequence: Synthetic oligonucleotide"
auaacuucuaaaggaagca

SEQ ID NO: 3015 - RNA, 19 nt, Artificial Sequence
  source: /note="Description of Artificial Sequence: Synthetic oligonucleotide"
acuucuaaaggaagcagaa

SEQ ID NO: 3016 - RNA, 19 nt, Artificial Sequence
  source: /note="Description of Artificial Sequence: Synthetic oligonucleotide"
uucuaaaggaagcagaaua

SEQ ID NO: 3017 - RNA, 19 nt, Artificial Sequence
  source: /note="Description of Artificial Sequence: Synthetic oligonucleotide"
ucuaaaggaagcagaauag

SEQ ID NO: 3018 - RNA, 19 nt, Artificial Sequence
  source: /note="Description of Artificial Sequence: Synthetic oligonucleotide"
cuaaaggaagcagaauagc

SEQ ID NO: 3019 - RNA, 19 nt, Artificial Sequence
  source: /note="Description of Artificial Sequence: Synthetic oligonucleotide"
aaaggaagcagaauagcuc

SEQ ID NO: 3020 - RNA, 19 nt, Artificial Sequence
  source: /note="Description of Artificial Sequence: Synthetic oligonucleotide"
auaaguaagaugcauuuac

SEQ ID NO: 3021 - RNA, 19 nt, Artificial Sequence
  source: /note="Description of Artificial Sequence: Synthetic oligonucleotide"
uaaguaagaugcauuuacu

SEQ ID NO: 3022 - RNA, 19 nt, Artificial Sequence
  source: /note="Description of Artificial Sequence: Synthetic oligonucleotide"
aaguaagaugcauuuacua

SEQ ID NO: 3023 - RNA, 19 nt, Artificial Sequence
  source: /note="Description of Artificial Sequence: Synthetic oligonucleotide"
aguaagaugcauuuacuac

SEQ ID NO: 3024 - RNA, 19 nt, Artificial Sequence
  source: /note="Description of Artificial Sequence: Synthetic oligonucleotide"
guaagaugcauuuacuaca

SEQ ID NO: 3025 - RNA, 19 nt, Artificial Sequence
  source: /note="Description of Artificial Sequence: Synthetic oligonucleotide"
uaagaugcauuuacuacag

SEQ ID NO: 3026 - RNA, 19 nt, Artificial Sequence
  source: /note="Description of Artificial Sequence: Synthetic oligonucleotide"
uuggcuucuaaugcuucag

SEQ ID NO: 3027 - RNA, 19 nt, Artificial Sequence
  source: /note="Description of Artificial Sequence: Synthetic oligonucleotide"
uggcuucuaaugcuucaga

SEQ ID NO: 3028 - RNA, 19 nt, Artificial Sequence
  source: /note="Description of Artificial Sequence: Synthetic oligonucleotide"
ggcuucuaaugcuucagau

SEQ ID NO: 3029 - RNA, 19 nt, Artificial Sequence
  source: /note="Description of Artificial Sequence: Synthetic oligonucleotide"
gcuucuaaugcuucagaua

SEQ ID NO: 3030 - RNA, 19 nt, Artificial Sequence
  source: /note="Description of Artificial Sequence: Synthetic oligonucleotide"
ucuaaugcuucagauagaa

SEQ ID NO: 3031 - RNA, 19 nt, Artificial Sequence
  source: /note="Description of Artificial Sequence: Synthetic oligonucleotide"
cuaaugcuucagauagaau

SEQ ID NO: 3032 - RNA, 19 nt, Artificial Sequence
  source: /note="Description of Artificial Sequence: Synthetic oligonucleotide"
uaaugcuucagauagaaua

SEQ ID NO: 3033 - RNA, 19 nt, Artificial Sequence
  source: /note="Description of Artificial Sequence: Synthetic oligonucleotide"
aaugcuucagauagaauac

SEQ ID NO: 3034 - RNA, 19 nt, Artificial Sequence
  source: /note="Description of Artificial Sequence: Synthetic oligonucleotide"
augcuucagauagaauaca

SEQ ID NO: 3035 - RNA, 19 nt, Artificial Sequence
  source: /note="Description of Artificial Sequence: Synthetic oligonucleotide"
ugcuucagauagaauacag

SEQ ID NO: 3036 - RNA, 19 nt, Artificial Sequence
  source: /note="Description of Artificial Sequence: Synthetic oligonucleotide"
gcuucagauagaauacagu

SEQ ID NO: 3037 - RNA, 19 nt, Artificial Sequence
  source: /note="Description of Artificial Sequence: Synthetic oligonucleotide"
cuucagauagaauacaguu

SEQ ID NO: 3038 - RNA, 19 nt, Artificial Sequence
  source: /note="Description of Artificial Sequence: Synthetic oligonucleotide"
uucagauagaauacaguug

SEQ ID NO: 3039 - RNA, 19 nt, Artificial Sequence
  source: /note="Description of Artificial Sequence: Synthetic oligonucleotide"
ucagauagaauacaguugg

SEQ ID NO: 3040 - RNA, 19 nt, Artificial Sequence
  source: /note="Description of Artificial Sequence: Synthetic oligonucleotide"
cagauagaauacaguuggg

SEQ ID NO: 3041 - RNA, 19 nt, Artificial Sequence
  source: /note="Description of Artificial Sequence: Synthetic oligonucleotide"
cauugugaaauaaaauuuu

SEQ ID NO: 3042 - RNA, 19 nt, Artificial Sequence
  source: /note="Description of Artificial Sequence: Synthetic oligonucleotide"
auugugaaauaaaauuuuc

SEQ ID NO: 3043 - RNA, 19 nt, Artificial Sequence
  source: /note="Description of Artificial Sequence: Synthetic oligonucleotide"
uugugaaauaaaauuuucu

SEQ ID NO: 3044 - RNA, 19 nt, Artificial Sequence
  source: /note="Description of Artificial Sequence: Synthetic oligonucleotide"
ugugaaauaaaauuuucuu

SEQ ID NO: 3045 - RNA, 19 nt, Artificial Sequence
  source: /note="Description of Artificial Sequence: Synthetic oligonucleotide"
gugaaauaaaauuuucuua

SEQ ID NO: 3046 - RNA, 19 nt, Artificial Sequence
  source: /note="Description of Artificial Sequence: Synthetic oligonucleotide"
ugaaauaaaauuuucuuac

SEQ ID NO: 3047 - RNA, 19 nt, Artificial Sequence
  source: /note="Description of Artificial Sequence: Synthetic oligonucleotide"
gaaauaaaauuuucuuacc

SEQ ID NO: 3048 - RNA, 19 nt, Artificial Sequence
  source: /note="Description of Artificial Sequence: Synthetic oligonucleotide"
aaauaaaauuuucuuaccc

SEQ ID NO: 3049 - RNA, 19 nt, Artificial Sequence
  source: /note="Description of Artificial Sequence: Synthetic oligonucleotide"
aauaaaauuuucuuaccca

SEQ ID NO: 3050 - RNA, 19 nt, Artificial Sequence
  source: /note="Description of Artificial Sequence: Synthetic oligonucleotide"
auaaaauuuucuuacccaa

SEQ ID NO: 3051 - RNA, 23 nt, Artificial Sequence
  source: /note="Description of Artificial Sequence: Synthetic oligonucleotide"
cucagcacagcagagcuuuccag

SEQ ID NO: 3052 - RNA, 23 nt, Artificial Sequence
  source: /note="Description of Artificial Sequence: Synthetic oligonucleotide"
ucagcacagcagagcuuuccaga

SEQ ID NO: 3053 - RNA, 23 nt, Artificial Sequence
  source: /note="Description of Artificial Sequence: Synthetic oligonucleotide"
ugagguucuucugugcacguugc

SEQ ID NO: 3054 - RNA, 23 nt, Artificial Sequence
  source: /note="Description of Artificial Sequence: Synthetic oligonucleotide"
gagguucuucugugcacguugcu

SEQ ID NO: 3055 - RNA, 23 nt, Artificial Sequence
  source: /note="Description of Artificial Sequence: Synthetic oligonucleotide"
uggccagucccaaugaauccagc

SEQ ID NO: 3056 - RNA, 23 nt, Artificial Sequence
  source: /note="Description of Artificial Sequence: Synthetic oligonucleotide"
accagcuggaaacccaaaccaga

SEQ ID NO: 3057 - RNA, 23 nt, Artificial Sequence
  source: /note="Description of Artificial Sequence: Synthetic oligonucleotide"
ccuccgagacaagucaguucugg

SEQ ID NO: 3058 - RNA, 23 nt, Artificial Sequence
  source: /note="Description of Artificial Sequence: Synthetic oligonucleotide"
cuccgagacaagucaguucugga

SEQ ID NO: 3059 - RNA, 23 nt, Artificial Sequence
  source: /note="Description of Artificial Sequence: Synthetic oligonucleotide"
ccaggcuccagagaaguuucuac

SEQ ID NO: 3060 - RNA, 23 nt, Artificial Sequence
  source: /note="Description of Artificial Sequence: Synthetic oligonucleotide"
caggcuccagagaaguuucuacg

SEQ ID NO: 3061 - RNA, 23 nt, Artificial Sequence
  source: /note="Description of Artificial Sequence: Synthetic oligonucleotide"
acguggaauuuggacacuuuggc

SEQ ID NO: 3062 - RNA, 23 nt, Artificial Sequence
  source: /note="Description of Artificial Sequence: Synthetic oligonucleotide"
cguggaauuuggacacuuuggcc

SEQ ID NO: 3063 - RNA, 23 nt, Artificial Sequence
  source: /note="Description of Artificial Sequence: Synthetic oligonucleotide"
guggaauuuggacacuuuggccu

SEQ ID NO: 3064 - RNA, 23 nt, Artificial Sequence
  source: /note="Description of Artificial Sequence: Synthetic oligonucleotide"
uggaauuuggacacuuuggccuu

SEQ ID NO: 3065 - RNA, 23 nt, Artificial Sequence
  source: /note="Description of Artificial Sequence: Synthetic oligonucleotide"
uuggacacuuuggccuuccagga

SEQ ID NO: 3066 - RNA, 23 nt, Artificial Sequence
  source: /note="Description of Artificial Sequence: Synthetic oligonucleotide"
cuuccaggaacugaaguccgagc

SEQ ID NO: 3067 - RNA, 23 nt, Artificial Sequence
  source: /note="Description of Artificial Sequence: Synthetic oligonucleotide"
aaguccgagcuaacugaaguucc

SEQ ID NO: 3068 - RNA, 23 nt, Artificial Sequence
  source: /note="Description of Artificial Sequence: Synthetic oligonucleotide"
aguuccugcuucccgaauuuuga

SEQ ID NO: 3069 - RNA, 23 nt, Artificial Sequence
  source: /note="Description of Artificial Sequence: Synthetic oligonucleotide"
gaacugaaguccgagcuaacuga

SEQ ID NO: 3070 - RNA, 23 nt, Artificial Sequence
  source: /note="Description of Artificial Sequence: Synthetic oligonucleotide"
uccgagcuaacugaaguuccugc

SEQ ID NO: 3071 - RNA, 23 nt, Artificial Sequence
  source: /note="Description of Artificial Sequence: Synthetic oligonucleotide"
uaacugaaguuccugcuucccga

SEQ ID NO: 3072 - RNA, 23 nt, Artificial Sequence
  source: /note="Description of Artificial Sequence: Synthetic oligonucleotide"
aaguuccugcuucccgaauuuug

SEQ ID NO: 3073 - RNA, 23 nt, Artificial Sequence
  source: /note="Description of Artificial Sequence: Synthetic oligonucleotide"
guuccugcuucccgaauuuugaa

SEQ ID NO: 3074 - RNA, 23 nt, Artificial Sequence
  source: /note="Description of Artificial Sequence: Synthetic oligonucleotide"
uuccugcuucccgaauuuugaag

SEQ ID NO: 3075 - RNA, 23 nt, Artificial Sequence
  source: /note="Description of Artificial Sequence: Synthetic oligonucleotide"
uccugcuucccgaauuuugaagg

SEQ ID NO: 3076 - RNA, 23 nt, Artificial Sequence
  source: /note="Description of Artificial Sequence: Synthetic oligonucleotide"
ccugcuucccgaauuuugaagga

SEQ ID NO: 3077 - RNA, 23 nt, Artificial Sequence
  source: /note="Description of Artificial Sequence: Synthetic oligonucleotide"
ugcuucccgaauuuugaaggaga

SEQ ID NO: 3078 - RNA, 23 nt, Artificial Sequence
  source: /note="Description of Artificial Sequence: Synthetic oligonucleotide"
accggauguggagaacuaguuug

SEQ ID NO: 3079 - RNA, 23 nt, Artificial Sequence
  source: /note="Description of Artificial Sequence: Synthetic oligonucleotide"
ccggauguggagaacuaguuugg

SEQ ID NO: 3080 - RNA, 23 nt, Artificial Sequence
  source: /note="Description of Artificial Sequence: Synthetic oligonucleotide"
cggauguggagaacuaguuuggg

SEQ ID NO: 3081 - RNA, 23 nt, Artificial Sequence
  source: /note="Description of Artificial Sequence: Synthetic oligonucleotide"
ggauguggagaacuaguuugggu

SEQ ID NO: 3082 - RNA, 23 nt, Artificial Sequence
  source: /note="Description of Artificial Sequence: Synthetic oligonucleotide"
gauguggagaacuaguuugggua

SEQ ID NO: 3083 - RNA, 23 nt, Artificial Sequence
  source: /note="Description of Artificial Sequence: Synthetic oligonucleotide"
uguggagaacuaguuuggguagg

SEQ ID NO: 3084 - RNA, 23 nt, Artificial Sequence
  source: /note="Description of Artificial Sequence: Synthetic oligonucleotide"
guggagaacuaguuuggguagga

SEQ ID NO: 3085 - RNA, 23 nt, Artificial Sequence
  source: /note="Description of Artificial Sequence: Synthetic oligonucleotide"
ggagaacuaguuuggguaggaga

SEQ ID NO: 3086 - RNA, 23 nt, Artificial Sequence
  source: /note="Description of Artificial Sequence: Synthetic oligonucleotide"
agaacagcagaaacaauuacugg

SEQ ID NO: 3087 - RNA, 23 nt, Artificial Sequence
  source: /note="Description of Artificial Sequence: Synthetic oligonucleotide"
gaacagcagaaacaauuacuggc

SEQ ID NO: 3088 - RNA, 23 nt, Artificial Sequence
  source: /note="Description of Artificial Sequence: Synthetic oligonucleotide"
gaaacaauuacuggcaaguaugg

SEQ ID NO: 3089 - RNA, 23 nt, Artificial Sequence
  source: /note="Description of Artificial Sequence: Synthetic oligonucleotide"
aaacaauuacuggcaaguauggu

SEQ ID NO: 3090 - RNA, 23 nt, Artificial Sequence
  source: /note="Description of Artificial Sequence: Synthetic oligonucleotide"
aacaauuacuggcaaguauggug

SEQ ID NO: 3091 - RNA, 23 nt, Artificial Sequence
  source: /note="Description of Artificial Sequence: Synthetic oligonucleotide"
acaauuacuggcaaguauggugu

SEQ ID NO: 3092 - RNA, 23 nt, Artificial Sequence
  source: /note="Description of Artificial Sequence: Synthetic oligonucleotide"
caauuacuggcaaguauggugug

SEQ ID NO: 3093 - RNA, 23 nt, Artificial Sequence
  source: /note="Description of Artificial Sequence: Synthetic oligonucleotide"
aauuacuggcaaguauggugugu

SEQ ID NO: 3094 - RNA, 23 nt, Artificial Sequence
  source: /note="Description of Artificial Sequence: Synthetic oligonucleotide"
aaguaugguguguggaugcgaga

SEQ ID NO: 3095 - RNA, 23 nt, Artificial Sequence
  source: /note="Description of Artificial Sequence: Synthetic oligonucleotide"
cggauguccgccagguuuuugag

SEQ ID NO: 3096 - RNA, 23 nt, Artificial Sequence
  source: /note="Description of Artificial Sequence: Synthetic oligonucleotide"
guccgccagguuuuugaguauga

SEQ ID NO: 3097 - RNA, 23 nt, Artificial Sequence
  source: /note="Description of Artificial Sequence: Synthetic oligonucleotide"
augaccucaucagccaguuuaug

SEQ ID NO: 3098 - RNA, 23 nt, Artificial Sequence
  source: /note="Description of Artificial Sequence: Synthetic oligonucleotide"
uuuuugaguaugaccucaucagc

SEQ ID NO: 3099 - RNA, 23 nt, Artificial Sequence
  source: /note="Description of Artificial Sequence: Synthetic oligonucleotide"
ugaccucaucagccaguuuaugc

SEQ ID NO: 3100 - RNA, 23 nt, Artificial Sequence
  source: /note="Description of Artificial Sequence: Synthetic oligonucleotide"
gaccucaucagccaguuuaugca

SEQ ID NO: 3101 - RNA, 23 nt, Artificial Sequence
  source: /note="Description of Artificial Sequence: Synthetic oligonucleotide"
ccucaucagccaguuuaugcagg

SEQ ID NO: 3102 - RNA, 23 nt, Artificial Sequence
  source: /note="Description of Artificial Sequence: Synthetic oligonucleotide"
augcagggcuacccuucuaaggu

SEQ ID NO: 3103 - RNA, 23 nt, Artificial Sequence
  source: /note="Description of Artificial Sequence: Synthetic oligonucleotide"
ugcagggcuacccuucuaagguu

SEQ ID NO: 3104 - RNA, 23 nt, Artificial Sequence
  source: /note="Description of Artificial Sequence: Synthetic oligonucleotide"
cagggcuacccuucuaagguuca

SEQ ID NO: 3105 - RNA, 23 nt, Artificial Sequence
  source: /note="Description of Artificial Sequence: Synthetic oligonucleotide"
cccuucuaagguucacauacugc

SEQ ID NO: 3106 - RNA, 23 nt, Artificial Sequence
  source: /note="Description of Artificial Sequence: Synthetic oligonucleotide"
ccuucuaagguucacauacugcc

SEQ ID NO: 3107 - RNA, 23 nt, Artificial Sequence
  source: /note="Description of Artificial Sequence: Synthetic oligonucleotide"
cugaguccagaacugucauaaga

SEQ ID NO: 3108 - RNA, 23 nt, Artificial Sequence
  source: /note="Description of Artificial Sequence: Synthetic oligonucleotide"
gaguccagaacugucauaagaua

SEQ ID NO: 3109 - RNA, 23 nt, Artificial Sequence
  source: /note="Description of Artificial Sequence: Synthetic oligonucleotide"
uccagaacugucauaagauauga

SEQ ID NO: 3110 - RNA, 23 nt, Artificial Sequence
  source: /note="Description of Artificial Sequence: Synthetic oligonucleotide"
ccagaacugucauaagauaugag

SEQ ID NO: 3111 - RNA, 23 nt, Artificial Sequence
  source: /note="Description of Artificial Sequence: Synthetic oligonucleotide"
cagaacugucauaagauaugagc

SEQ ID NO: 3112 - RNA, 23 nt, Artificial Sequence
  source: /note="Description of Artificial Sequence: Synthetic oligonucleotide"
agaacugucauaagauaugagcu

SEQ ID NO: 3113 - RNA, 23 nt, Artificial Sequence
  source: /note="Description of Artificial Sequence: Synthetic oligonucleotide"
auaagauaugagcugaauaccga

SEQ ID NO: 3114 - RNA, 23 nt, Artificial Sequence
  source: /note="Description of Artificial Sequence: Synthetic oligonucleotide"
uaagauaugagcugaauaccgag

SEQ ID NO: 3115 - RNA, 23 nt, Artificial Sequence
  source: /note="Description of Artificial Sequence: Synthetic oligonucleotide"
aagauaugagcugaauaccgaga

SEQ ID NO: 3116 - RNA, 23 nt, Artificial Sequence
  source: /note="Description of Artificial Sequence: Synthetic oligonucleotide"
gcugaauaccgagacagugaagg

SEQ ID NO: 3117 - RNA, 23 nt, Artificial Sequence
  source: /note="Description of Artificial Sequence: Synthetic oligonucleotide"
cugaauaccgagacagugaaggc

SEQ ID NO: 3118 - RNA, 23 nt, Artificial Sequence
  source: /note="Description of Artificial Sequence: Synthetic oligonucleotide"
uaccacggacaguucccguauuc

SEQ ID NO: 3119 - RNA, 23 nt, Artificial Sequence
  source: /note="Description of Artificial Sequence: Synthetic oligonucleotide"
accacggacaguucccguauucu

SEQ ID NO: 3120 - RNA, 23 nt, Artificial Sequence
  source: /note="Description of Artificial Sequence: Synthetic oligonucleotide"
ccacggacaguucccguauucuu

SEQ ID NO: 3121 - RNA, 23 nt, Artificial Sequence
  source: /note="Description of Artificial Sequence: Synthetic oligonucleotide"
cuaccacggacaguucccguauu

SEQ ID NO: 3122 - RNA, 23 nt, Artificial Sequence
  source: /note="Description of Artificial Sequence: Synthetic oligonucleotide"
cacggacaguucccguauucuug

SEQ ID NO: 3123 - RNA, 23 nt, Artificial Sequence
  source: /note="Description of Artificial Sequence: Synthetic oligonucleotide"
acggacaguucccguauucuugg

SEQ ID NO: 3124 - RNA, 23 nt, Artificial Sequence
  source: /note="Description of Artificial Sequence: Synthetic oligonucleotide"
cggacaguucccguauucuuggg

SEQ ID NO: 3125 - RNA, 23 nt, Artificial Sequence
  source: /note="Description of Artificial Sequence: Synthetic oligonucleotide"
agcaggccucugggucauuuaca

SEQ ID NO: 3126 - RNA, 23 nt, Artificial Sequence
  source: /note="Description of Artificial Sequence: Synthetic oligonucleotide"
gcaggccucugggucauuuacag

SEQ ID NO: 3127 - RNA, 23 nt, Artificial Sequence
  source: /note="Description of Artificial Sequence: Synthetic oligonucleotide"
caggccucugggucauuuacagc

SEQ ID NO: 3128 - RNA, 23 nt, Artificial Sequence
  source: /note="Description of Artificial Sequence: Synthetic oligonucleotide"
ugaggccaaaggugccauugucc

SEQ ID NO: 3129 - RNA, 23 nt, Artificial Sequence
  source: /note="Description of Artificial Sequence: Synthetic oligonucleotide"
ugccauuguccucuccaaacuga

SEQ ID NO: 3130 - RNA, 23 nt, Artificial Sequence
  source: /note="Description of Artificial Sequence: Synthetic oligonucleotide"
cagucgccaaugccuucaucauc

SEQ ID NO: 3131 - RNA, 23 nt, Artificial Sequence
  source: /note="Description of Artificial Sequence: Synthetic oligonucleotide"
gcuaccgucaacuuugcuuauga

SEQ ID NO: 3132 - RNA, 23 nt, Artificial Sequence
  source: /note="Description of Artificial Sequence: Synthetic oligonucleotide"
cuaccgucaacuuugcuuaugac

SEQ ID NO: 3133 - RNA, 23 nt, Artificial Sequence
  source: /note="Description of Artificial Sequence: Synthetic oligonucleotide"
uaccgucaacuuugcuuaugaca

SEQ ID NO: 3134 - RNA, 23 nt, Artificial Sequence
  source: /note="Description of Artificial Sequence: Synthetic oligonucleotide"
cuuaugacacaggcacagguauc

SEQ ID NO: 3135 - RNA, 23 nt, Artificial Sequence
  source: /note="Description of Artificial Sequence: Synthetic oligonucleotide"
agacccugaccaucccauucaag

SEQ ID NO: 3136 - RNA, 23 nt, Artificial Sequence
  source: /note="Description of Artificial Sequence: Synthetic oligonucleotide"
accaucccauucaagaaccgcua

SEQ ID NO: 3137 - RNA, 23 nt, Artificial Sequence
  source: /note="Description of Artificial Sequence: Synthetic oligonucleotide"
gacccugaccaucccauucaaga

SEQ ID NO: 3138 - RNA, 23 nt, Artificial Sequence
  source: /note="Description of Artificial Sequence: Synthetic oligonucleotide"
ugaccaucccauucaagaaccgc

SEQ ID NO: 3139 - RNA, 23 nt, Artificial Sequence
  source: /note="Description of Artificial Sequence: Synthetic oligonucleotide"
gaccaucccauucaagaaccgcu

SEQ ID NO: 3140 - RNA, 23 nt, Artificial Sequence
  source: /note="Description of Artificial Sequence: Synthetic oligonucleotide"
uauaaguacagcagcaugauuga

SEQ ID NO: 3141 - RNA, 23 nt, Artificial Sequence
  source: /note="Description of Artificial Sequence: Synthetic oligonucleotide"
auaaguacagcagcaugauugac

SEQ ID NO: 3142 - RNA, 23 nt, Artificial Sequence
  source: /note="Description of Artificial Sequence: Synthetic oligonucleotide"
aaguacagcagcaugauugacua

SEQ ID NO: 3143 - RNA, 23 nt, Artificial Sequence
  source: /note="Description of Artificial Sequence: Synthetic oligonucleotide"
gcucuuugccugggacaacuuga

SEQ ID NO: 3144 - RNA, 23 nt, Artificial Sequence
  source: /note="Description of Artificial Sequence: Synthetic oligonucleotide"
aacuugaacauggucacuuauga

SEQ ID NO: 3145 - RNA, 23 nt, Artificial Sequence
  source: /note="Description of Artificial Sequence: Synthetic oligonucleotide"
acuugaacauggucacuuaugac

SEQ ID NO: 3146 - RNA, 23 nt, Artificial Sequence
  source: /note="Description of Artificial Sequence: Synthetic oligonucleotide"
cuugaacauggucacuuaugaca

SEQ ID NO: 3147 - RNA, 23 nt, Artificial Sequence
  source: /note="Description of Artificial Sequence: Synthetic oligonucleotide"
acaucaagcucuccaagauguga

SEQ ID NO: 3148 - RNA, 23 nt, Artificial Sequence
  source: /note="Description of Artificial Sequence: Synthetic oligonucleotide"
caucaagcucuccaagaugugaa

SEQ ID NO: 3149 - RNA, 23 nt, Artificial Sequence
  source: /note="Description of Artificial Sequence: Synthetic oligonucleotide"
uauucaggaauuguagucugagg

SEQ ID NO: 3150 - RNA, 23 nt, Artificial Sequence
  source: /note="Description of Artificial Sequence: Synthetic oligonucleotide"
uuuaucuucugucagcauuuaug

SEQ ID NO: 3151 - RNA, 23 nt, Artificial Sequence
  source: /note="Description of Artificial Sequence: Synthetic oligonucleotide"
uuaucuucugucagcauuuaugg

SEQ ID NO: 3152 - RNA, 23 nt, Artificial Sequence
  source: /note="Description of Artificial Sequence: Synthetic oligonucleotide"
uaucuucugucagcauuuauggg

SEQ ID NO: 3153 - RNA, 23 nt, Artificial Sequence
  source: /note="Description of Artificial Sequence: Synthetic oligonucleotide"
aucuucugucagcauuuauggga

SEQ ID NO: 3154 - RNA, 23 nt, Artificial Sequence
  source: /note="Description of Artificial Sequence: Synthetic oligonucleotide"
cuucugucagcauuuaugggaug

SEQ ID NO: 3155 - RNA, 23 nt, Artificial Sequence
  source: /note="Description of Artificial Sequence: Synthetic oligonucleotide"
uucugucagcauuuaugggaugu

SEQ ID NO: 3156 - RNA, 23 nt, Artificial Sequence
  source: /note="Description of Artificial Sequence: Synthetic oligonucleotide"
agcauuuaugggauguuuaauga

SEQ ID NO: 3157 - RNA, 23 nt, Artificial Sequence
  source: /note="Description of Artificial Sequence: Synthetic oligonucleotide"
gcauuuaugggauguuuaaugac

SEQ ID NO: 3158 - RNA, 23 nt, Artificial Sequence
  source: /note="Description of Artificial Sequence: Synthetic oligonucleotide"
cauuuaugggauguuuaaugaca

SEQ ID NO: 3159 - RNA, 23 nt, Artificial Sequence
  source: /note="Description of Artificial Sequence: Synthetic oligonucleotide"
gggauguuuaaugacauaguuca

SEQ ID NO: 3160 - RNA, 23 nt, Artificial Sequence
  source: /note="Description of Artificial Sequence: Synthetic oligonucleotide"
aaugacauaguucaaguuuucuu

SEQ ID NO: 3161 - RNA, 23 nt, Artificial Sequence
  source: /note="Description of Artificial Sequence: Synthetic oligonucleotide"
augacauaguucaaguuuucuug

SEQ ID NO: 3162 - RNA, 23 nt, Artificial Sequence
  source: /note="Description of Artificial Sequence: Synthetic oligonucleotide"
ugacauaguucaaguuuucuugu

SEQ ID NO: 3163 - RNA, 23 nt, Artificial Sequence
  source: /note="Description of Artificial Sequence: Synthetic oligonucleotide"
uuucuuccugaaaaccauugcuc

SEQ ID NO: 3164 - RNA, 23 nt, Artificial Sequence
  source: /note="Description of Artificial Sequence: Synthetic oligonucleotide"
gacauaguucaaguuuucuugug

SEQ ID NO: 3165 - RNA, 23 nt, Artificial Sequence
  source: /note="Description of Artificial Sequence: Synthetic oligonucleotide"
acauaguucaaguuuucuuguga

SEQ ID NO: 3166 - RNA, 23 nt, Artificial Sequence
  source: /note="Description of Artificial Sequence: Synthetic oligonucleotide"
cauaguucaaguuuucuugugau

SEQ ID NO: 3167 - RNA, 23 nt, Artificial Sequence
  source: /note="Description of Artificial Sequence: Synthetic oligonucleotide"
auaguucaaguuuucuugugauu

SEQ ID NO: 3168 - RNA, 23 nt, Artificial Sequence
  source: /note="Description of Artificial Sequence: Synthetic oligonucleotide"
guucaaguuuucuugugauuugg

SEQ ID NO: 3169 - RNA, 23 nt, Artificial Sequence
  source: /note="Description of Artificial Sequence: Synthetic oligonucleotide"
cugaaaaccauugcucuugcaug

SEQ ID NO: 3170 - RNA, 23 nt, Artificial Sequence
  source: /note="Description of Artificial Sequence: Synthetic oligonucleotide"
ugaaaaccauugcucuugcaugu

SEQ ID NO: 3171 - RNA, 23 nt, Artificial Sequence
  source: /note="Description of Artificial Sequence: Synthetic oligonucleotide"
ccauugcucuugcauguuacaug

SEQ ID NO: 3172 - RNA, 23 nt, Artificial Sequence
  source: /note="Description of Artificial Sequence: Synthetic oligonucleotide"
cauugcucuugcauguuacaugg

SEQ ID NO: 3173 - RNA, 23 nt, Artificial Sequence
  source: /note="Description of Artificial Sequence: Synthetic oligonucleotide"
cucuugcauguuacaugguuacc

SEQ ID NO: 3174 - RNA, 23 nt, Artificial Sequence
  source: /note="Description of Artificial Sequence: Synthetic oligonucleotide"
ugcucuugcauguuacaugguua

SEQ ID NO: 3175 - RNA, 23 nt, Artificial Sequence
  source: /note="Description of Artificial Sequence: Synthetic oligonucleotide"
gcucuugcauguuacaugguuac

SEQ ID NO: 3176 - RNA, 23 nt, Artificial Sequence
  source: /note="Description of Artificial Sequence: Synthetic oligonucleotide"
uaaaaagcauaacuucuaaagga

SEQ ID NO: 3177 - RNA, 23 nt, Artificial Sequence
  source: /note="Description of Artificial Sequence: Synthetic oligonucleotide"
aaaaagcauaacuucuaaaggaa

SEQ ID NO: 3178 - RNA, 23 nt, Artificial Sequence
  source: /note="Description of Artificial Sequence: Synthetic oligonucleotide"
cuucuaaaggaagcagaauagcu

SEQ ID NO: 3179 - RNA, 23 nt, Artificial Sequence
  source: /note="Description of Artificial Sequence: Synthetic oligonucleotide"
uucuaaaggaagcagaauagcuc

SEQ ID NO: 3180 - RNA, 23 nt, Artificial Sequence
  source: /note="Description of Artificial Sequence: Synthetic oligonucleotide"
auaaguaagaugcauuuacuaca

SEQ ID NO: 3181 - RNA, 23 nt, Artificial Sequence
  source: /note="Description of Artificial Sequence: Synthetic oligonucleotide"
gcuucagauagaauacaguuggg

SEQ ID NO: 3182 - RNA, 23 nt, Artificial Sequence
  source: /note="Description of Artificial Sequence: Synthetic oligonucleotide"
caguuggcuucuaaugcuucaga

SEQ ID NO: 3183 - RNA, 23 nt, Artificial Sequence
  source: /note="Description of Artificial Sequence: Synthetic oligonucleotide"
cuucuaaugcuucagauagaaua

SEQ ID NO: 3184 - RNA, 23 nt, Artificial Sequence
  source: /note="Description of Artificial Sequence: Synthetic oligonucleotide"
uaaugcuucagauagaauacagu

SEQ ID NO: 3185 - RNA, 23 nt, Artificial Sequence
  source: /note="Description of Artificial Sequence: Synthetic oligonucleotide"
ugcuucagauagaauacaguugg

SEQ ID NO: 3186 - RNA, 23 nt, Artificial Sequence
  source: /note="Description of Artificial Sequence: Synthetic oligonucleotide"
uccgagacaagucaguucuggag

SEQ ID NO: 3187 - RNA, 23 nt, Artificial Sequence
  source: /note="Description of Artificial Sequence: Synthetic oligonucleotide"
caggcuccagagaaguuucuacg

SEQ ID NO: 3188 - RNA, 23 nt, Artificial Sequence
  source: /note="Description of Artificial Sequence: Synthetic oligonucleotide"
uacguggaauuuggacacuuugg

SEQ ID NO: 3189 - RNA, 23 nt, Artificial Sequence
  source: /note="Description of Artificial Sequence: Synthetic oligonucleotide"
acguggaauuuggacacuuuggc

SEQ ID NO: 3190 - RNA, 23 nt, Artificial Sequence
  source: /note="Description of Artificial Sequence: Synthetic oligonucleotide"
ccuuccaggaacugaaguccgag

SEQ ID NO: 3191 - RNA, 23 nt, Artificial Sequence
  source: /note="Description of Artificial Sequence: Synthetic oligonucleotide"
aacugaaguccgagcuaacugaa

SEQ ID NO: 3192 - RNA, 23 nt, Artificial Sequence
  source: /note="Description of Artificial Sequence: Synthetic oligonucleotide"
ugaaguccgagcuaacugaaguu

SEQ ID NO: 3193 - RNA, 23 nt, Artificial Sequence
  source: /note="Description of Artificial Sequence: Synthetic oligonucleotide"
gaaguccgagcuaacugaaguuc

SEQ ID NO: 3194 - RNA, 23 nt, Artificial Sequence
  source: /note="Description of Artificial Sequence: Synthetic oligonucleotide"
aaguccgagcuaacugaaguucc

SEQ ID NO: 3195 - RNA, 23 nt, Artificial Sequence
  source: /note="Description of Artificial Sequence: Synthetic oligonucleotide"
aguccgagcuaacugaaguuccu

SEQ ID NO: 3196 - RNA, 23 nt, Artificial Sequence
  source: /note="Description of Artificial Sequence: Synthetic oligonucleotide"
guccgagcuaacugaaguuccug

SEQ ID NO: 3197 - RNA, 23 nt, Artificial Sequence
  source: /note="Description of Artificial Sequence: Synthetic oligonucleotide"
uccgagcuaacugaaguuccugc

SEQ ID NO: 3198 - RNA, 23 nt, Artificial Sequence
  source: /note="Description of Artificial Sequence: Synthetic oligonucleotide"
ugaaguuccugcuucccgaauuu

SEQ ID NO: 3199 - RNA, 23 nt, Artificial Sequence
  source: /note="Description of Artificial Sequence: Synthetic oligonucleotide"
gaaguuccugcuucccgaauuuu

SEQ ID NO: 3200 - RNA, 23 nt, Artificial Sequence
  source: /note="Description of Artificial Sequence: Synthetic oligonucleotide"
aaguuccugcuucccgaauuuug

SEQ ID NO: 3201 - RNA, 23 nt, Artificial Sequence
  source: /note="Description of Artificial Sequence: Synthetic oligonucleotide"
aguuccugcuucccgaauuuuga

SEQ ID NO: 3202 - RNA, 23 nt, Artificial Sequence
  source: /note="Description of Artificial Sequence: Synthetic oligonucleotide"
guuccugcuucccgaauuuugaa

SEQ ID NO: 3203 - RNA, 23 nt, Artificial Sequence
  source: /note="Description of Artificial Sequence: Synthetic oligonucleotide"
uuccugcuucccgaauuuugaag

SEQ ID NO: 3204 - RNA, 23 nt, Artificial Sequence
  source: /note="Description of Artificial Sequence: Synthetic oligonucleotide"
uccugcuucccgaauuuugaagg

SEQ ID NO: 3205 - RNA, 23 nt, Artificial Sequence
  source: /note="Description of Artificial Sequence: Synthetic oligonucleotide"
ugcuucccgaauuuugaaggaga

SEQ ID NO: 3206 - RNA, 23 nt, Artificial Sequence
  source: /note="Description of Artificial Sequence: Synthetic oligonucleotide"
accggauguggagaacuaguuug

SEQ ID NO: 3207 - RNA, 23 nt, Artificial Sequence
  source: /note="Description of Artificial Sequence: Synthetic oligonucleotide"
ccggauguggagaacuaguuugg

SEQ ID NO: 3208 - RNA, 23 nt, Artificial Sequence
  source: /note="Description of Artificial Sequence: Synthetic oligonucleotide"
gauguggagaacuaguuugggua

SEQ ID NO: 3209 - RNA, 23 nt, Artificial Sequence
  source: /note="Description of Artificial Sequence: Synthetic oligonucleotide"
agaacagcagaaacaauuacugg

SEQ ID NO: 3210 - RNA, 23 nt, Artificial Sequence
  source: /note="Description of Artificial Sequence: Synthetic oligonucleotide"
gaacagcagaaacaauuacuggc

SEQ ID NO: 3211 - RNA, 23 nt, Artificial Sequence
  source: /note="Description of Artificial Sequence: Synthetic oligonucleotide"
aacagcagaaacaauuacuggca

SEQ ID NO: 3212 - RNA, 23 nt, Artificial Sequence
  source: /note="Description of Artificial Sequence: Synthetic oligonucleotide"
agcagaaacaauuacuggcaagu

SEQ ID NO: 3213 - RNA, 23 nt, Artificial Sequence
  source: /note="Description of Artificial Sequence: Synthetic oligonucleotide"
agaaacaauuacuggcaaguaug

SEQ ID NO: 3214 - RNA, 23 nt, Artificial Sequence
  source: /note="Description of Artificial Sequence: Synthetic oligonucleotide"
gaaacaauuacuggcaaguaugg

SEQ ID NO: 3215 - RNA, 23 nt, Artificial Sequence
  source: /note="Description of Artificial Sequence: Synthetic oligonucleotide"
auuacuggcaaguauggugugug

SEQ ID NO: 3216 - RNA, 23 nt, Artificial Sequence
  source: /note="Description of Artificial Sequence: Synthetic oligonucleotide"
uguccgccagguuuuugaguaug

SEQ ID NO: 3217 - RNA, 23 nt, Artificial Sequence
  source: /note="Description of Artificial Sequence: Synthetic oligonucleotide"
uccgccagguuuuugaguaugac

SEQ ID NO: 3218 - RNA, 23 nt, Artificial Sequence
  source: /note="Description of Artificial Sequence: Synthetic oligonucleotide"
uuuuugaguaugaccucaucagc

SEQ ID NO: 3219 - RNA, 23 nt, Artificial Sequence
  source: /note="Description of Artificial Sequence: Synthetic oligonucleotide"
augaccucaucagccaguuuaug

SEQ ID NO: 3220 - RNA, 23 nt, Artificial Sequence
  source: /note="Description of Artificial Sequence: Synthetic oligonucleotide"
ugaccucaucagccaguuuaugc

SEQ ID NO: 3221 - RNA, 23 nt, Artificial Sequence
  source: /note="Description of Artificial Sequence: Synthetic oligonucleotide"
gggcuacccuucuaagguucaca

SEQ ID NO: 3222 - RNA, 23 nt, Artificial Sequence
  source: /note="Description of Artificial Sequence: Synthetic oligonucleotide"
cccuucuaagguucacauacugc

SEQ ID NO: 3223 - RNA, 23 nt, Artificial Sequence
  source: /note="Description of Artificial Sequence: Synthetic oligonucleotide"
ccuucuaagguucacauacugcc

SEQ ID NO: 3224 - RNA, 23 nt, Artificial Sequence
  source: /note="Description of Artificial Sequence: Synthetic oligonucleotide"
cuucuaagguucacauacugccu

SEQ ID NO: 3225 - RNA, 23 nt, Artificial Sequence
  source: /note="Description of Artificial Sequence: Synthetic oligonucleotide"
cugaguccagaacugucauaaga

SEQ ID NO: 3226 - RNA, 23 nt, Artificial Sequence
  source: /note="Description of Artificial Sequence: Synthetic oligonucleotide"
ugaguccagaacugucauaagau

SEQ ID NO: 3227 - RNA, 23 nt, Artificial Sequence
  source: /note="Description of Artificial Sequence: Synthetic oligonucleotide"
gaguccagaacugucauaagaua

SEQ ID NO: 3228 - RNA, 23 nt, Artificial Sequence
  source: /note="Description of Artificial Sequence: Synthetic oligonucleotide"
uccagaacugucauaagauauga

SEQ ID NO: 3229 - RNA, 23 nt, Artificial Sequence
  source: /note="Description of Artificial Sequence: Synthetic oligonucleotide"
ccagaacugucauaagauaugag

SEQ ID NO: 3230 - RNA, 23 nt, Artificial Sequence
  source: /note="Description of Artificial Sequence: Synthetic oligonucleotide"
cagaacugucauaagauaugagc

SEQ ID NO: 3231 - RNA, 23 nt, Artificial Sequence
  source: /note="Description of Artificial Sequence: Synthetic oligonucleotide"
agaacugucauaagauaugagcu

SEQ ID NO: 3232 - RNA, 23 nt, Artificial Sequence
  source: /note="Description of Artificial Sequence: Synthetic oligonucleotide"
aacugucauaagauaugagcuga

SEQ ID NO: 3233 - RNA, 23 nt, Artificial Sequence
  source: /note="Description of Artificial Sequence: Synthetic oligonucleotide"
cauaagauaugagcugaauaccg

SEQ ID NO: 3234 - RNA, 23 nt, Artificial Sequence
  source: /note="Description of Artificial Sequence: Synthetic oligonucleotide"
uaagauaugagcugaauaccgag

SEQ ID NO: 3235 - RNA, 23 nt, Artificial Sequence
  source: /note="Description of Artificial Sequence: Synthetic oligonucleotide"
agauaugagcugaauaccgagac

SEQ ID NO: 3236 - RNA, 23 nt, Artificial Sequence
  source: /note="Description of Artificial Sequence: Synthetic oligonucleotide"
accacggacaguucccguauucu

SEQ ID NO: 3237 - RNA, 23 nt, Artificial Sequence
  source: /note="Description of Artificial Sequence: Synthetic oligonucleotide"
ccacggacaguucccguauucuu

SEQ ID NO: 3238 - RNA, 23 nt, Artificial Sequence
  source: /note="Description of Artificial Sequence: Synthetic oligonucleotide"
acggacaguucccguauucuugg

SEQ ID NO: 3239 - RNA, 23 nt, Artificial Sequence
  source: /note="Description of Artificial Sequence: Synthetic oligonucleotide"
gcuaccgucaacuuugcuuauga

SEQ ID NO: 3240 - RNA, 23 nt, Artificial Sequence
  source: /note="Description of Artificial Sequence: Synthetic oligonucleotide"
cuaccgucaacuuugcuuaugac

SEQ ID NO: 3241 - RNA, 23 nt, Artificial Sequence
  source: /note="Description of Artificial Sequence: Synthetic oligonucleotide"
uaccgucaacuuugcuuaugaca

SEQ ID NO: 3242 - RNA, 23 nt, Artificial Sequence
  source: /note="Description of Artificial Sequence: Synthetic oligonucleotide"
accgucaacuuugcuuaugacac

SEQ ID NO: 3243 - RNA, 23 nt, Artificial Sequence
  source: /note="Description of Artificial Sequence: Synthetic oligonucleotide"
cuauaaguacagcagcaugauug

SEQ ID NO: 3244 - RNA, 23 nt, Artificial Sequence
  source: /note="Description of Artificial Sequence: Synthetic oligonucleotide"
uauaaguacagcagcaugauuga

SEQ ID NO: 3245 - RNA, 23 nt, Artificial Sequence
  source: /note="Description of Artificial Sequence: Synthetic oligonucleotide"
aaguacagcagcaugauugacua

SEQ ID NO: 3246 - RNA, 23 nt, Artificial Sequence
  source: /note="Description of Artificial Sequence: Synthetic oligonucleotide"
ucuuugccugggacaacuugaac

SEQ ID NO: 3247 - RNA, 23 nt, Artificial Sequence
  source: /note="Description of Artificial Sequence: Synthetic oligonucleotide"
aacuugaacauggucacuuauga

SEQ ID NO: 3248 - RNA, 23 nt, Artificial Sequence
  source: /note="Description of Artificial Sequence: Synthetic oligonucleotide"
acuugaacauggucacuuaugac

SEQ ID NO: 3249 - RNA, 23 nt, Artificial Sequence
  source: /note="Description of Artificial Sequence: Synthetic oligonucleotide"
cuugaacauggucacuuaugaca

SEQ ID NO: 3250 - RNA, 23 nt, Artificial Sequence
  source: /note="Description of Artificial Sequence: Synthetic oligonucleotide"
uugaacauggucacuuaugacau

SEQ ID NO: 3251 - RNA, 23 nt, Artificial Sequence
  source: /note="Description of Artificial Sequence: Synthetic oligonucleotide"
cauggucacuuaugacaucaagc

SEQ ID NO: 3252 - RNA, 23 nt, Artificial Sequence
  source: /note="Description of Artificial Sequence: Synthetic oligonucleotide"
auggucacuuaugacaucaagcu

SEQ ID NO: 3253 - RNA, 23 nt, Artificial Sequence
  source: /note="Description of Artificial Sequence: Synthetic oligonucleotide"
uggucacuuaugacaucaagcuc

SEQ ID NO: 3254 - RNA, 23 nt, Artificial Sequence
  source: /note="Description of Artificial Sequence: Synthetic oligonucleotide"
ggucacuuaugacaucaagcucu

SEQ ID NO: 3255 - RNA, 23 nt, Artificial Sequence
  source: /note="Description of Artificial Sequence: Synthetic oligonucleotide"
gacaucaagcucuccaagaugug

SEQ ID NO: 3256 - RNA, 23 nt, Artificial Sequence
  source: /note="Description of Artificial Sequence: Synthetic oligonucleotide"
aagcucuccaagaugugaaaagc

SEQ ID NO: 3257 - RNA, 23 nt, Artificial Sequence
  source: /note="Description of Artificial Sequence: Synthetic oligonucleotide"
gcucuccaagaugugaaaagccu

SEQ ID NO: 3258 - RNA, 23 nt, Artificial Sequence
  source: /note="Description of Artificial Sequence: Synthetic oligonucleotide"
uauucaggaauuguagucugagg

SEQ ID NO: 3259 - RNA, 23 nt, Artificial Sequence
  source: /note="Description of Artificial Sequence: Synthetic oligonucleotide"
uuuaucuucugucagcauuuaug

SEQ ID NO: 3260 - RNA, 23 nt, Artificial Sequence
  source: /note="Description of Artificial Sequence: Synthetic oligonucleotide"
uuaucuucugucagcauuuaugg

SEQ ID NO: 3261 - RNA, 23 nt, Artificial Sequence
  source: /note="Description of Artificial Sequence: Synthetic oligonucleotide"
uaucuucugucagcauuuauggg

SEQ ID NO: 3262 - RNA, 23 nt, Artificial Sequence
  source: /note="Description of Artificial Sequence: Synthetic oligonucleotide"
aucuucugucagcauuuauggga

SEQ ID NO: 3263 - RNA, 23 nt, Artificial Sequence
  source: /note="Description of Artificial Sequence: Synthetic oligonucleotide"
cuucugucagcauuuaugggaug

SEQ ID NO: 3264 - RNA, 23 nt, Artificial Sequence
  source: /note="Description of Artificial Sequence: Synthetic oligonucleotide"
uucugucagcauuuaugggaugu

SEQ ID NO: 3265 - RNA, 23 nt, Artificial Sequence
  source: /note="Description of Artificial Sequence: Synthetic oligonucleotide"
ugucagcauuuaugggauguuua

SEQ ID NO: 3266 - RNA, 23 nt, Artificial Sequence
  source: /note="Description of Artificial Sequence: Synthetic oligonucleotide"
gucagcauuuaugggauguuuaa

SEQ ID NO: 3267 - RNA, 23 nt, Artificial Sequence
  source: /note="Description of Artificial Sequence: Synthetic oligonucleotide"
ucagcauuuaugggauguuuaau

SEQ ID NO: 3268 - RNA, 23 nt, Artificial Sequence
  source: /note="Description of Artificial Sequence: Synthetic oligonucleotide"
agcauuuaugggauguuuaauga

SEQ ID NO: 3269 - RNA, 23 nt, Artificial Sequence
  source: /note="Description of Artificial Sequence: Synthetic oligonucleotide"
gcauuuaugggauguuuaaugac

SEQ ID NO: 3270 - RNA, 23 nt, Artificial Sequence
  source: /note="Description of Artificial Sequence: Synthetic oligonucleotide"
ugggauguuuaaugacauaguuc

SEQ ID NO: 3271 - RNA, 23 nt, Artificial Sequence
  source: /note="Description of Artificial Sequence: Synthetic oligonucleotide"
gggauguuuaaugacauaguuca

SEQ ID NO: 3272 - RNA, 23 nt, Artificial Sequence
  source: /note="Description of Artificial Sequence: Synthetic oligonucleotide"
ggauguuuaaugacauaguucaa

SEQ ID NO: 3273 - RNA, 23 nt, Artificial Sequence
  source: /note="Description of Artificial Sequence: Synthetic oligonucleotide"
auguuuaaugacauaguucaagu

SEQ ID NO: 3274 - RNA, 23 nt, Artificial Sequence
  source: /note="Description of Artificial Sequence: Synthetic oligonucleotide"
uguuuaaugacauaguucaaguu

SEQ ID NO: 3275 - RNA, 23 nt, Artificial Sequence
  source: /note="Description of Artificial Sequence: Synthetic oligonucleotide"
aaugacauaguucaaguuuucuu

SEQ ID NO: 3276 - RNA, 23 nt, Artificial Sequence
  source: /note="Description of Artificial Sequence: Synthetic oligonucleotide"
augacauaguucaaguuuucuug

SEQ ID NO: 3277 - RNA, 23 nt, Artificial Sequence
  source: /note="Description of Artificial Sequence: Synthetic oligonucleotide"
ugacauaguucaaguuuucuugu

SEQ ID NO: 3278 - RNA, 23 nt, Artificial Sequence
  source: /note="Description of Artificial Sequence: Synthetic oligonucleotide"
gacauaguucaaguuuucuugug

SEQ ID NO: 3279 - RNA, 23 nt, Artificial Sequence
  source: /note="Description of Artificial Sequence: Synthetic oligonucleotide"
acauaguucaaguuuucuuguga

SEQ ID NO: 3280 - RNA, 23 nt, Artificial Sequence
  source: /note="Description of Artificial Sequence: Synthetic oligonucleotide"
cauaguucaaguuuucuugugau

SEQ ID NO: 3281 - RNA, 23 nt, Artificial Sequence
  source: /note="Description of Artificial Sequence: Synthetic oligonucleotide"
auaguucaaguuuucuugugauu

SEQ ID NO: 3282 - RNA, 23 nt, Artificial Sequence
  source: /note="Description of Artificial Sequence: Synthetic oligonucleotide"
uaguucaaguuuucuugugauuu

SEQ ID NO: 3283 - RNA, 23 nt, Artificial Sequence
  source: /note="Description of Artificial Sequence: Synthetic oligonucleotide"
guucaaguuuucuugugauuugg

SEQ ID NO: 3284 - RNA, 23 nt, Artificial Sequence
  source: /note="Description of Artificial Sequence: Synthetic oligonucleotide"
uaauaguuucuuccugaaaacca

SEQ ID NO: 3285 - RNA, 23 nt, Artificial Sequence
  source: /note="Description of Artificial Sequence: Synthetic oligonucleotide"
guuucuuccugaaaaccauugcu

SEQ ID NO: 3286 - RNA, 23 nt, Artificial Sequence
  source: /note="Description of Artificial Sequence: Synthetic oligonucleotide"
uuucuuccugaaaaccauugcuc

SEQ ID NO: 3287 - RNA, 23 nt, Artificial Sequence
  source: /note="Description of Artificial Sequence: Synthetic oligonucleotide"
ucuuccugaaaaccauugcucuu

SEQ ID NO: 3288 - RNA, 23 nt, Artificial Sequence
  source: /note="Description of Artificial Sequence: Synthetic oligonucleotide"
cugaaaaccauugcucuugcaug

SEQ ID NO: 3289 - RNA, 23 nt, Artificial Sequence
  source: /note="Description of Artificial Sequence: Synthetic oligonucleotide"
ugaaaaccauugcucuugcaugu

SEQ ID NO: 3290 - RNA, 23 nt, Artificial Sequence
  source: /note="Description of Artificial Sequence: Synthetic oligonucleotide"
aaaaccauugcucuugcauguua

SEQ ID NO: 3291 - RNA, 23 nt, Artificial Sequence
  source: /note="Description of Artificial Sequence: Synthetic oligonucleotide"
aaaccauugcucuugcauguuac

SEQ ID NO: 3292 - RNA, 23 nt, Artificial Sequence
  source: /note="Description of Artificial Sequence: Synthetic oligonucleotide"
aaccauugcucuugcauguuaca

SEQ ID NO: 3293 - RNA, 23 nt, Artificial Sequence
  source: /note="Description of Artificial Sequence: Synthetic oligonucleotide"
accauugcucuugcauguuacau

SEQ ID NO: 3294 - RNA, 23 nt, Artificial Sequence
  source: /note="Description of Artificial Sequence: Synthetic oligonucleotide"
ccauugcucuugcauguuacaug

SEQ ID NO: 3295 - RNA, 23 nt, Artificial Sequence
  source: /note="Description of Artificial Sequence: Synthetic oligonucleotide"
cauugcucuugcauguuacaugg

SEQ ID NO: 3296 - RNA, 23 nt, Artificial Sequence
  source: /note="Description of Artificial Sequence: Synthetic oligonucleotide"
auugcucuugcauguuacauggu

SEQ ID NO: 3297 - RNA, 23 nt, Artificial Sequence
  source: /note="Description of Artificial Sequence: Synthetic oligonucleotide"
uugcucuugcauguuacaugguu

SEQ ID NO: 3298 - RNA, 23 nt, Artificial Sequence
  source: /note="Description of Artificial Sequence: Synthetic oligonucleotide"
ugcucuugcauguuacaugguua

SEQ ID NO: 3299 - RNA, 23 nt, Artificial Sequence
  source: /note="Description of Artificial Sequence: Synthetic oligonucleotide"
gcucuugcauguuacaugguuac

SEQ ID NO: 3300 - RNA, 23 nt, Artificial Sequence
  source: /note="Description of Artificial Sequence: Synthetic oligonucleotide"
cucuugcauguuacaugguuacc

SEQ ID NO: 3301 - RNA, 23 nt, Artificial Sequence
  source: /note="Description of Artificial Sequence: Synthetic oligonucleotide"
ucuugcauguuacaugguuacca

SEQ ID NO: 3302 - RNA, 23 nt, Artificial Sequence
  source: /note="Description of Artificial Sequence: Synthetic oligonucleotide"
cuugcauguuacaugguuaccac

SEQ ID NO: 3303 - RNA, 23 nt, Artificial Sequence
  source: /note="Description of Artificial Sequence: Synthetic oligonucleotide"
uugcauguuacaugguuaccaca

SEQ ID NO: 3304 - RNA, 23 nt, Artificial Sequence
  source: /note="Description of Artificial Sequence: Synthetic oligonucleotide"
uaaaaagcauaacuucuaaagga

SEQ ID NO: 3305 - RNA, 23 nt, Artificial Sequence
  source: /note="Description of Artificial Sequence: Synthetic oligonucleotide"
aaaaagcauaacuucuaaaggaa

SEQ ID NO: 3306 - RNA, 23 nt, Artificial Sequence
  source: /note="Description of Artificial Sequence: Synthetic oligonucleotide"
aaaagcauaacuucuaaaggaag

SEQ ID NO: 3307 - RNA, 23 nt, Artificial Sequence
  source: /note="Description of Artificial Sequence: Synthetic oligonucleotide"
aaagcauaacuucuaaaggaagc

SEQ ID NO: 3308 - RNA, 23 nt, Artificial Sequence
  source: /note="Description of Artificial Sequence: Synthetic oligonucleotide"
acuucuaaaggaagcagaauagc

SEQ ID NO: 3309 - RNA, 23 nt, Artificial Sequence
  source: /note="Description of Artificial Sequence: Synthetic oligonucleotide"
cuucuaaaggaagcagaauagcu

SEQ ID NO: 3310 - RNA, 23 nt, Artificial Sequence
  source: /note="Description of Artificial Sequence: Synthetic oligonucleotide"
uucuaaaggaagcagaauagcuc

SEQ ID NO: 3311 - RNA, 23 nt, Artificial Sequence
  source: /note="Description of Artificial Sequence: Synthetic oligonucleotide"
auaaguaagaugcauuuacuaca

SEQ ID NO: 3312 - RNA, 23 nt, Artificial Sequence
  source: /note="Description of Artificial Sequence: Synthetic oligonucleotide"
caguuggcuucuaaugcuucaga

SEQ ID NO: 3313 - RNA, 23 nt, Artificial Sequence
  source: /note="Description of Artificial Sequence: Synthetic oligonucleotide"
uggcuucuaaugcuucagauaga

SEQ ID NO: 3314 - RNA, 23 nt, Artificial Sequence
  source: /note="Description of Artificial Sequence: Synthetic oligonucleotide"
gcuucuaaugcuucagauagaau

SEQ ID NO: 3315 - RNA, 23 nt, Artificial Sequence
  source: /note="Description of Artificial Sequence: Synthetic oligonucleotide"
cuucuaaugcuucagauagaaua

SEQ ID NO: 3316 - RNA, 23 nt, Artificial Sequence
  source: /note="Description of Artificial Sequence: Synthetic oligonucleotide"
uaaugcuucagauagaauacagu

SEQ ID NO: 3317 - RNA, 23 nt, Artificial Sequence
  source: /note="Description of Artificial Sequence: Synthetic oligonucleotide"
aaugcuucagauagaauacaguu

SEQ ID NO: 3318 - RNA, 23 nt, Artificial Sequence
  source: /note="Description of Artificial Sequence: Synthetic oligonucleotide"
ugcuucagauagaauacaguugg

SEQ ID NO: 3319 - RNA, 23 nt, Artificial Sequence
  source: /note="Description of Artificial Sequence: Synthetic oligonucleotide"
gcuucagauagaauacaguuggg

SEQ ID NO: 3320 - RNA, 23 nt, Artificial Sequence
  source: /note="Description of Artificial Sequence: Synthetic oligonucleotide"
cucagcacagcagagcuuuccag

SEQ ID NO: 3321 - RNA, 23 nt, Artificial Sequence
  source: /note="Description of Artificial Sequence: Synthetic oligonucleotide"
ucagcacagcagagcuuuccaga

SEQ ID NO: 3322 - RNA, 23 nt, Artificial Sequence
  source: /note="Description of Artificial Sequence: Synthetic oligonucleotide"
ugagguucuucugugcacguugc

SEQ ID NO: 3323 - RNA, 23 nt, Artificial Sequence
  source: /note="Description of Artificial Sequence: Synthetic oligonucleotide"
gagguucuucugugcacguugcu

SEQ ID NO: 3324 - RNA, 23 nt, Artificial Sequence
  source: /note="Description of Artificial Sequence: Synthetic oligonucleotide"
uggccagucccaaugaauccagc

SEQ ID NO: 3325 - RNA, 23 nt, Artificial Sequence
  source: /note="Description of Artificial Sequence: Synthetic oligonucleotide"
ccuccgagacaagucaguucugg

SEQ ID NO: 3326 - RNA, 23 nt, Artificial Sequence
  source: /note="Description of Artificial Sequence: Synthetic oligonucleotide"
cuccgagacaagucaguucugga

SEQ ID NO: 3327 - RNA, 23 nt, Artificial Sequence
  source: /note="Description of Artificial Sequence: Synthetic oligonucleotide"
ccaggcuccagagaaguuucuac

SEQ ID NO: 3328 - RNA, 23 nt, Artificial Sequence
  source: /note="Description of Artificial Sequence: Synthetic oligonucleotide"
caggcuccagagaaguuucuacg

SEQ ID NO: 3329 - RNA, 23 nt, Artificial Sequence
  source: /note="Description of Artificial Sequence: Synthetic oligonucleotide"
acguggaauuuggacacuuuggc

SEQ ID NO: 3330 - RNA, 23 nt, Artificial Sequence
  source: /note="Description of Artificial Sequence: Synthetic oligonucleotide"
cguggaauuuggacacuuuggcc

SEQ ID NO: 3331 - RNA, 23 nt, Artificial Sequence
  source: /note="Description of Artificial Sequence: Synthetic oligonucleotide"
guggaauuuggacacuuuggccu

SEQ ID NO: 3332 - RNA, 23 nt, Artificial Sequence
  source: /note="Description of Artificial Sequence: Synthetic oligonucleotide"
uggaauuuggacacuuuggccuu

SEQ ID NO: 3333 - RNA, 23 nt, Artificial Sequence
  source: /note="Description of Artificial Sequence: Synthetic oligonucleotide"
uuggacacuuuggccuuccagga

SEQ ID NO: 3334 - RNA, 23 nt, Artificial Sequence
  source: /note="Description of Artificial Sequence: Synthetic oligonucleotide"
cuuccaggaacugaaguccgagc

SEQ ID NO: 3335 - RNA, 23 nt, Artificial Sequence
  source: /note="Description of Artificial Sequence: Synthetic oligonucleotide"
gaacugaaguccgagcuaacuga

SEQ ID NO: 3336 - RNA, 23 nt, Artificial Sequence
  source: /note="Description of Artificial Sequence: Synthetic oligonucleotide"
uccgagcuaacugaaguuccugc

SEQ ID NO: 3337 - RNA, 23 nt, Artificial Sequence
  source: /note="Description of Artificial Sequence: Synthetic oligonucleotide"
uaacugaaguuccugcuucccga

SEQ ID NO: 3338 - RNA, 23 nt, Artificial Sequence
  source: /note="Description of Artificial Sequence: Synthetic oligonucleotide"
aaguuccugcuucccgaauuuug

SEQ ID NO: 3339 - RNA, 23 nt, Artificial Sequence
  source: /note="Description of Artificial Sequence: Synthetic oligonucleotide"
guuccugcuucccgaauuuugaa

SEQ ID NO: 3340 - RNA, 23 nt, Artificial Sequence
  source: /note="Description of Artificial Sequence: Synthetic oligonucleotide"
uuccugcuucccgaauuuugaag

SEQ ID NO: 3341 - RNA, 23 nt, Artificial Sequence
  source: /note="Description of Artificial Sequence: Synthetic oligonucleotide"
uccugcuucccgaauuuugaagg

SEQ ID NO: 3342 - RNA, 23 nt, Artificial Sequence
  source: /note="Description of Artificial Sequence: Synthetic oligonucleotide"
ccugcuucccgaauuuugaagga

SEQ ID NO: 3343 - RNA, 23 nt, Artificial Sequence
  source: /note="Description of Artificial Sequence: Synthetic oligonucleotide"
ugcuucccgaauuuugaaggaga

SEQ ID NO: 3344 - RNA, 23 nt, Artificial Sequence
  source: /note="Description of Artificial Sequence: Synthetic oligonucleotide"
cggauguggagaacuaguuuggg

SEQ ID NO: 3345 - RNA, 23 nt, Artificial Sequence
  source: /note="Description of Artificial Sequence: Synthetic oligonucleotide"
ggauguggagaacuaguuugggu

SEQ ID NO: 3346 - RNA, 23 nt, Artificial Sequence
  source: /note="Description of Artificial Sequence: Synthetic oligonucleotide"
gauguggagaacuaguuugggua

SEQ ID NO: 3347 - RNA, 23 nt, Artificial Sequence
  source: /note="Description of Artificial Sequence: Synthetic oligonucleotide"
uguggagaacuaguuuggguagg

SEQ ID NO: 3348 - RNA, 23 nt, Artificial Sequence
  source: /note="Description of Artificial Sequence: Synthetic oligonucleotide"
guggagaacuaguuuggguagga

SEQ ID NO: 3349 - RNA, 23 nt, Artificial Sequence
  source: /note="Description of Artificial Sequence: Synthetic oligonucleotide"
ggagaacuaguuuggguaggaga

SEQ ID NO: 3350 - RNA, 23 nt, Artificial Sequence
  source: /note="Description of Artificial Sequence: Synthetic oligonucleotide"
agaacagcagaaacaauuacugg

SEQ ID NO: 3351 - RNA, 23 nt, Artificial Sequence
  source: /note="Description of Artificial Sequence: Synthetic oligonucleotide"
gaacagcagaaacaauuacuggc

SEQ ID NO: 3352 - RNA, 23 nt, Artificial Sequence
  source: /note="Description of Artificial Sequence: Synthetic oligonucleotide"
gaaacaauuacuggcaaguaugg

SEQ ID NO: 3353 - RNA, 23 nt, Artificial Sequence
  source: /note="Description of Artificial Sequence: Synthetic oligonucleotide"
aaacaauuacuggcaaguauggu

SEQ ID NO: 3354 - RNA, 23 nt, Artificial Sequence
  source: /note="Description of Artificial Sequence: Synthetic oligonucleotide"
aacaauuacuggcaaguauggug

SEQ ID NO: 3355 - RNA, 23 nt, Artificial Sequence
  source: /note="Description of Artificial Sequence: Synthetic oligonucleotide"
acaauuacuggcaaguauggugu

SEQ ID NO: 3356 - RNA, 23 nt, Artificial Sequence
  source: /note="Description of Artificial Sequence: Synthetic oligonucleotide"
caauuacuggcaaguauggugug

SEQ ID NO: 3357 - RNA, 23 nt, Artificial Sequence
  source: /note="Description of Artificial Sequence: Synthetic oligonucleotide"
aauuacuggcaaguauggugugu

SEQ ID NO: 3358 - RNA, 23 nt, Artificial Sequence
  source: /note="Description of Artificial Sequence: Synthetic oligonucleotide"
aaguaugguguguggaugcgaga

SEQ ID NO: 3359 - RNA, 23 nt, Artificial Sequence
  source: /note="Description of Artificial Sequence: Synthetic oligonucleotide"
cggauguccgccagguuuuugag

SEQ ID NO: 3360 - RNA, 23 nt, Artificial Sequence
  source: /note="Description of Artificial Sequence: Synthetic oligonucleotide"
uuuuugaguaugaccucaucagc

SEQ ID NO: 3361 - RNA, 23 nt, Artificial Sequence
  source: /note="Description of Artificial Sequence: Synthetic oligonucleotide"
ugaccucaucagccaguuuaugc

SEQ ID NO: 3362 - RNA, 23 nt, Artificial Sequence
  source: /note="Description of Artificial Sequence: Synthetic oligonucleotide"
gaccucaucagccaguuuaugca

SEQ ID NO: 3363 - RNA, 23 nt, Artificial Sequence
  source: /note="Description of Artificial Sequence: Synthetic oligonucleotide"
ccucaucagccaguuuaugcagg

SEQ ID NO: 3364 - RNA, 23 nt, Artificial Sequence
  source: /note="Description of Artificial Sequence: Synthetic oligonucleotide"
augcagggcuacccuucuaaggu

SEQ ID NO: 3365 - RNA, 23 nt, Artificial Sequence
  source: /note="Description of Artificial Sequence: Synthetic oligonucleotide"
ugcagggcuacccuucuaagguu

SEQ ID NO: 3366 - RNA, 23 nt, Artificial Sequence
  source: /note="Description of Artificial Sequence: Synthetic oligonucleotide"
cagggcuacccuucuaagguuca

SEQ ID NO: 3367 - RNA, 23 nt, Artificial Sequence
  source: /note="Description of Artificial Sequence: Synthetic oligonucleotide"
cccuucuaagguucacauacugc

SEQ ID NO: 3368 - RNA, 23 nt, Artificial Sequence
  source: /note="Description of Artificial Sequence: Synthetic oligonucleotide"
ccuucuaagguucacauacugcc

SEQ ID NO: 3369 - RNA, 23 nt, Artificial Sequence
  source: /note="Description of Artificial Sequence: Synthetic oligonucleotide"
gaguccagaacugucauaagaua

SEQ ID NO: 3370 - RNA, 23 nt, Artificial Sequence
  source: /note="Description of Artificial Sequence: Synthetic oligonucleotide"
uccagaacugucauaagauauga

SEQ ID NO: 3371 - RNA, 23 nt, Artificial Sequence
  source: /note="Description of Artificial Sequence: Synthetic oligonucleotide"
ccagaacugucauaagauaugag

SEQ ID NO: 3372 - RNA, 23 nt, Artificial Sequence
  source: /note="Description of Artificial Sequence: Synthetic oligonucleotide"
cagaacugucauaagauaugagc

SEQ ID NO: 3373 - RNA, 23 nt, Artificial Sequence
  source: /note="Description of Artificial Sequence: Synthetic oligonucleotide"
agaacugucauaagauaugagcu

SEQ ID NO: 3374 - RNA, 23 nt, Artificial Sequence
  source: /note="Description of Artificial Sequence: Synthetic oligonucleotide"
auaagauaugagcugaauaccga

SEQ ID NO: 3375 - RNA, 23 nt, Artificial Sequence
  source: /note="Description of Artificial Sequence: Synthetic oligonucleotide"
uaagauaugagcugaauaccgag

SEQ ID NO: 3376 - RNA, 23 nt, Artificial Sequence
  source: /note="Description of Artificial Sequence: Synthetic oligonucleotide"
aagauaugagcugaauaccgaga

SEQ ID NO: 3377 - RNA, 23 nt, Artificial Sequence
  source: /note="Description of Artificial Sequence: Synthetic oligonucleotide"
gcugaauaccgagacagugaagg

SEQ ID NO: 3378 - RNA, 23 nt, Artificial Sequence
  source: /note="Description of Artificial Sequence: Synthetic oligonucleotide"
cugaauaccgagacagugaaggc

SEQ ID NO: 3379 - RNA, 23 nt, Artificial Sequence
  source: /note="Description of Artificial Sequence: Synthetic oligonucleotide"
cuaccacggacaguucccguauu

SEQ ID NO: 3380 - RNA, 23 nt, Artificial Sequence
  source: /note="Description of Artificial Sequence: Synthetic oligonucleotide"
cacggacaguucccguauucuug

SEQ ID NO: 3381 - RNA, 23 nt, Artificial Sequence
  source: /note="Description of Artificial Sequence: Synthetic oligonucleotide"
acggacaguucccguauucuugg

SEQ ID NO: 3382 - RNA, 23 nt, Artificial Sequence
  source: /note="Description of Artificial Sequence: Synthetic oligonucleotide"
cggacaguucccguauucuuggg

SEQ ID NO: 3383 - RNA, 23 nt, Artificial Sequence
  source: /note="Description of Artificial Sequence: Synthetic oligonucleotide"
agcaggccucugggucauuuaca

SEQ ID NO: 3384 - RNA, 23 nt, Artificial Sequence
  source: /note="Description of Artificial Sequence: Synthetic oligonucleotide"
gcaggccucugggucauuuacag

SEQ ID NO: 3385 - RNA, 23 nt, Artificial Sequence
  source: /note="Description of Artificial Sequence: Synthetic oligonucleotide"
caggccucugggucauuuacagc

SEQ ID NO: 3386 - RNA, 23 nt, Artificial Sequence
  source: /note="Description of Artificial Sequence: Synthetic oligonucleotide"
ugaggccaaaggugccauugucc

SEQ ID NO: 3387 - RNA, 23 nt, Artificial Sequence
  source: /note="Description of Artificial Sequence: Synthetic oligonucleotide"
ugccauuguccucuccaaacuga

SEQ ID NO: 3388 - RNA, 23 nt, Artificial Sequence
  source: /note="Description of Artificial Sequence: Synthetic oligonucleotide"
cagucgccaaugccuucaucauc

SEQ ID NO: 3389 - RNA, 23 nt, Artificial Sequence
  source: /note="Description of Artificial Sequence: Synthetic oligonucleotide"
gcuaccgucaacuuugcuuauga

SEQ ID NO: 3390 - RNA, 23 nt, Artificial Sequence
  source: /note="Description of Artificial Sequence: Synthetic oligonucleotide"
cuaccgucaacuuugcuuaugac

SEQ ID NO: 3391 - RNA, 23 nt, Artificial Sequence
  source: /note="Description of Artificial Sequence: Synthetic oligonucleotide"
uaccgucaacuuugcuuaugaca

SEQ ID NO: 3392 - RNA, 23 nt, Artificial Sequence
  source: /note="Description of Artificial Sequence: Synthetic oligonucleotide"
cuuaugacacaggcacagguauc

SEQ ID NO: 3393 - RNA, 23 nt, Artificial Sequence
  source: /note="Description of Artificial Sequence: Synthetic oligonucleotide"
agacccugaccaucccauucaag

SEQ ID NO: 3394 - RNA, 23 nt, Artificial Sequence
  source: /note="Description of Artificial Sequence: Synthetic oligonucleotide"
gacccugaccaucccauucaaga

SEQ ID NO: 3395 - RNA, 23 nt, Artificial Sequence
  source: /note="Description of Artificial Sequence: Synthetic oligonucleotide"
ugaccaucccauucaagaaccgc

SEQ ID NO: 3396 - RNA, 23 nt, Artificial Sequence
  source: /note="Description of Artificial Sequence: Synthetic oligonucleotide"
gaccaucccauucaagaaccgcu

SEQ ID NO: 3397 - RNA, 23 nt, Artificial Sequence
  source: /note="Description of Artificial Sequence: Synthetic oligonucleotide"
uauaaguacagcagcaugauuga

SEQ ID NO: 3398 - RNA, 23 nt, Artificial Sequence
  source: /note="Description of Artificial Sequence: Synthetic oligonucleotide"
auaaguacagcagcaugauugac

SEQ ID NO: 3399 - RNA, 23 nt, Artificial Sequence
  source: /note="Description of Artificial Sequence: Synthetic oligonucleotide"
aaguacagcagcaugauugacua

SEQ ID NO: 3400 - RNA, 23 nt, Artificial Sequence
  source: /note="Description of Artificial Sequence: Synthetic oligonucleotide"
gcucuuugccugggacaacuuga

SEQ ID NO: 3401 - RNA, 23 nt, Artificial Sequence
  source: /note="Description of Artificial Sequence: Synthetic oligonucleotide"
cuugaacauggucacuuaugaca

SEQ ID NO: 3402 - RNA, 23 nt, Artificial Sequence
  source: /note="Description of Artificial Sequence: Synthetic oligonucleotide"
acaucaagcucuccaagauguga

SEQ ID NO: 3403 - RNA, 23 nt, Artificial Sequence
  source: /note="Description of Artificial Sequence: Synthetic oligonucleotide"
caucaagcucuccaagaugugaa

SEQ ID NO: 3404 - RNA, 23 nt, Artificial Sequence
  source: /note="Description of Artificial Sequence: Synthetic oligonucleotide"
uauucaggaauuguagucugagg

SEQ ID NO: 3405 - RNA, 23 nt, Artificial Sequence
  source: /note="Description of Artificial Sequence: Synthetic oligonucleotide"
uuuaucuucugucagcauuuaug

SEQ ID NO: 3406 - RNA, 23 nt, Artificial Sequence
  source: /note="Description of Artificial Sequence: Synthetic oligonucleotide"
uuaucuucugucagcauuuaugg

SEQ ID NO: 3407 - RNA, 23 nt, Artificial Sequence
  source: /note="Description of Artificial Sequence: Synthetic oligonucleotide"
uaucuucugucagcauuuauggg

SEQ ID NO: 3408 - RNA, 23 nt, Artificial Sequence
  source: /note="Description of Artificial Sequence: Synthetic oligonucleotide"
aucuucugucagcauuuauggga

SEQ ID NO: 3409 - RNA, 23 nt, Artificial Sequence
  source: /note="Description of Artificial Sequence: Synthetic oligonucleotide"
cuucugucagcauuuaugggaug

SEQ ID NO: 3410 - RNA, 23 nt, Artificial Sequence
  source: /note="Description of Artificial Sequence: Synthetic oligonucleotide"
uucugucagcauuuaugggaugu

SEQ ID NO: 3411 - RNA, 23 nt, Artificial Sequence
  source: /note="Description of Artificial Sequence: Synthetic oligonucleotide"
agcauuuaugggauguuuaauga

SEQ ID NO: 3412 - RNA, 23 nt, Artificial Sequence
  source: /note="Description of Artificial Sequence: Synthetic oligonucleotide"
gcauuuaugggauguuuaaugac

SEQ ID NO: 3413 - RNA, 23 nt, Artificial Sequence
  source: /note="Description of Artificial Sequence: Synthetic oligonucleotide"
cauuuaugggauguuuaaugaca

SEQ ID NO: 3414 - RNA, 23 nt, Artificial Sequence
  source: /note="Description of Artificial Sequence: Synthetic oligonucleotide"
gggauguuuaaugacauaguuca

SEQ ID NO: 3415 - RNA, 23 nt, Artificial Sequence
  source: /note="Description of Artificial Sequence: Synthetic oligonucleotide"
aaugacauaguucaaguuuucuu

SEQ ID NO: 3416 - RNA, 23 nt, Artificial Sequence
  source: /note="Description of Artificial Sequence: Synthetic oligonucleotide"
augacauaguucaaguuuucuug

SEQ ID NO: 3417 - RNA, 23 nt, Artificial Sequence
  source: /note="Description of Artificial Sequence: Synthetic oligonucleotide"
ugacauaguucaaguuuucuugu

SEQ ID NO: 3418 - RNA, 23 nt, Artificial Sequence
  source: /note="Description of Artificial Sequence: Synthetic oligonucleotide"
gacauaguucaaguuuucuugug

SEQ ID NO: 3419 - RNA, 23 nt, Artificial Sequence
  source: /note="Description of Artificial Sequence: Synthetic oligonucleotide"
acauaguucaaguuuucuuguga

SEQ ID NO: 3420 - RNA, 23 nt, Artificial Sequence
  source: /note="Description of Artificial Sequence: Synthetic oligonucleotide"
cauaguucaaguuuucuugugau

SEQ ID NO: 3421 - RNA, 23 nt, Artificial Sequence
  source: /note="Description of Artificial Sequence: Synthetic oligonucleotide"
auaguucaaguuuucuugugauu

SEQ ID NO: 3422 - RNA, 23 nt, Artificial Sequence
  source: /note="Description of Artificial Sequence: Synthetic oligonucleotide"
guucaaguuuucuugugauuugg

SEQ ID NO: 3423 - RNA, 23 nt, Artificial Sequence
  source: /note="Description of Artificial Sequence: Synthetic oligonucleotide"
cugaaaaccauugcucuugcaug

SEQ ID NO: 3424 - RNA, 23 nt, Artificial Sequence
  source: /note="Description of Artificial Sequence: Synthetic oligonucleotide"
ugaaaaccauugcucuugcaugu

SEQ ID NO: 3425 - RNA, 23 nt, Artificial Sequence
  source: /note="Description of Artificial Sequence: Synthetic oligonucleotide"
ccauugcucuugcauguuacaug

SEQ ID NO: 3426 - RNA, 23 nt, Artificial Sequence
  source: /note="Description of Artificial Sequence: Synthetic oligonucleotide"
cauugcucuugcauguuacaugg

SEQ ID NO: 3427 - RNA, 23 nt, Artificial Sequence
  source: /note="Description of Artificial Sequence: Synthetic oligonucleotide"
ugcucuugcauguuacaugguua

SEQ ID NO: 3428 - RNA, 23 nt, Artificial Sequence
  source: /note="Description of Artificial Sequence: Synthetic oligonucleotide"
gcucuugcauguuacaugguuac

SEQ ID NO: 3429 - RNA, 23 nt, Artificial Sequence
  source: /note="Description of Artificial Sequence: Synthetic oligonucleotide"
uaaaaagcauaacuucuaaagga

SEQ ID NO: 3430 - RNA, 23 nt, Artificial Sequence
  source: /note="Description of Artificial Sequence: Synthetic oligonucleotide"
aaaaagcauaacuucuaaaggaa

SEQ ID NO: 3431 - RNA, 23 nt, Artificial Sequence
  source: /note="Description of Artificial Sequence: Synthetic oligonucleotide"
cuucuaaaggaagcagaauagcu

SEQ ID NO: 3432 - RNA, 23 nt, Artificial Sequence
  source: /note="Description of Artificial Sequence: Synthetic oligonucleotide"
uucuaaaggaagcagaauagcuc

SEQ ID NO: 3433 - RNA, 23 nt, Artificial Sequence
  source: /note="Description of Artificial Sequence: Synthetic oligonucleotide"
auaaguaagaugcauuuacuaca

SEQ ID NO: 3434 - RNA, 23 nt, Artificial Sequence
  source: /note="Description of Artificial Sequence: Synthetic oligonucleotide"
caguuggcuucuaaugcuucaga

SEQ ID NO: 3435 - RNA, 23 nt, Artificial Sequence
  source: /note="Description of Artificial Sequence: Synthetic oligonucleotide"
cuucuaaugcuucagauagaaua

SEQ ID NO: 3436 - RNA, 23 nt, Artificial Sequence
  source: /note="Description of Artificial Sequence: Synthetic oligonucleotide"
uaaugcuucagauagaauacagu

SEQ ID NO: 3437 - RNA, 23 nt, Artificial Sequence
  source: /note="Description of Artificial Sequence: Synthetic oligonucleotide"
ugcuucagauagaauacaguugg

SEQ ID NO: 3438 - protein, 16 aa, Unknown
  source: /note="Description of Unknown: RFGF sequence"
AAVALLPAVLLALLAP

SEQ ID NO: 3439 - protein, 11 aa, Unknown
  source: /note="Description of Unknown: RFGF analogue sequence"
AALLPVLLAAP

SEQ ID NO: 3440 - protein, 13 aa, Human immunodeficiency virus
GRKKRRQRRRPPQ

SEQ ID NO: 3441 - protein, 16 aa, Drosophila sp.
RQIKIWFQNRRMKWKK

We claim:

1. A double stranded ribonucleic acid (dsRNA) agent for inhibiting expression of myocilin (MYOC), wherein the dsRNA agent comprises a sense strand and an antisense strand forming a double stranded region, wherein the antisense strand comprises a nucleotide sequence comprising at least 15 contiguous nucleotides, with 0, 1, 2, or 3 mismatches, from one of the antisense sequences listed in any one of Tables 2A, 2B, 3A, 3B, 4A, 4B, 5A, and 5B, and wherein the sense strand comprises a nucleotide sequence comprising at least 15 contiguous nucleotides, with 0, 1, 2, or 3 mismatches, from a sense sequence listed in any one of Tables 2A, 2B, 3A, 3B, 4A, 4B, 5A, and 5B that corresponds to the antisense sequence.

2. The dsRNA agent of claim 1, wherein at least one of the sense strand and the antisense strand is conjugated to one or more lipophilic moieties.

3. The dsRNA agent of claim 2, wherein the lipophilic moiety is conjugated via a linker or carrier.

4. The dsRNA agent of claim 2 or 3, wherein one or more lipophilic moieties are conjugated to one or more internal positions on at least one strand.

5. The dsRNA agent of claim 4, wherein the one or more lipophilic moieties are conjugated to one or more internal positions on at least one strand via a linker or carrier.

6. The dsRNA agent of any one of claims 2-5, wherein the lipophilic moiety is an aliphatic, alicyclic, or polyalicyclic compound.

7. The dsRNA agent of claim 6, wherein the lipophilic moiety contains a saturated or unsaturated C16 hydrocarbon chain.

8. The dsRNA agent of any one of claims 2-7, wherein the lipophilic moiety is conjugated via a carrier that replaces one or more nucleotide(s) in the internal position(s) or the double stranded region.

9. The dsRNA agent of any one of claims 2-7, wherein the lipophilic moiety is conjugated to the double-stranded iRNA agent via a linker containing an ether, thioether, urea, carbonate, amine, amide, maleimide-thioether, disulfide, phosphodiester, sulfonamide linkage, a product of a click reaction, or carbamate.

10. The double-stranded iRNA agent of any one of claims 2-8, wherein the lipophilic moiety is conjugated to a nucleobase, sugar moiety, or internucleosidic linkage.

11. The dsRNA agent of any of the preceding claims, wherein the dsRNA agent comprises at least one modified nucleotide.

12. The dsRNA agent of claim 11, wherein no more than five of the sense strand nucleotides and not more than five of the nucleotides of the antisense strand are unmodified nucleotides.

13. The dsRNA agent of claim 11, wherein all of the nucleotides of the sense strand and all of the nucleotides of the antisense strand comprise a modification.

14. The dsRNA agent of any one of claims 11-13, wherein at least one of the modified nucleotides is selected from the group consisting of a deoxy-nucleotide, a 3′-terminal deoxy-thymine (dT) nucleotide, a 2′-O-methyl modified nucleotide, a 2′-fluoro modified nucleotide, a 2′-deoxy-modified nucleotide, a locked nucleotide, an unlocked nucleotide, a conformationally restricted nucleotide, a constrained ethyl nucleotide, an abasic nucleotide, a 2′-amino-modified nucleotide, a 2′-O-allyl-modified nucleotide, 2′-C-alkyl-modified nucleotide, a 2′-methoxyethyl modified nucleotide, a 2′-O-alkyl-modified nucleotide, a morpholino nucleotide, a phosphoramidate, a non-natural base comprising nucleotide, a tetrahydropyran modified nucleotide, a 1,5-anhydrohexitol modified nucleotide, a cyclohexenyl modified nucleotide, a nucleotide comprising a phosphorothioate group, a nucleotide comprising a methylphosphonate group, a nucleotide comprising a 5′-phosphate, a nucleotide comprising a 5′-phosphate mimic, a glycol modified nucleotide, and a 2-O-(N-methylacetamide) modified nucleotide; and combinations thereof.

15. The dsRNA agent of any of the preceding claims, wherein at least one strand comprises a 3′ overhang of at least 2 nucleotides.

16. The dsRNA agent of any of the preceding claims, wherein the double stranded region is 15-30 nucleotide pairs in length.

17. The dsRNA agent of claim 16, wherein the double stranded region is 17-23 nucleotide pairs in length.

18. The dsRNA agent of any of the preceding claims, wherein each strand has 19-30 nucleotides.

19. The dsRNA agent of any of the preceding claims, wherein the agent comprises at least one phosphorothioate or methylphosphonate internucleotide linkage.

20. The dsRNA agent of any one of claims 2-19, further comprising a targeting ligand, e.g., a ligand that targets an ocular tissue.

21. The dsRNA agent of claim 20, wherein the ocular tissue is a trabecular meshwork tissue, a ciliary body, a retinal tissue, a retinal pigment epithelium (RPE) or choroid tissue, e.g., a choroid vessel.

22. The dsRNA agent of any one of the preceding claims, further comprising a phosphate or phosphate mimic at the 5′-end of the antisense strand.

23. The dsRNA agent of claim 22, wherein the phosphate mimic is a 5′-vinyl phosphonate (VP).

24. A cell containing the dsRNA agent of any one of claims 1-23.

25. A pharmaceutical composition for inhibiting expression of a MYOC, comprising the dsRNA agent of any one of claims 1-23.

26. A method of inhibiting expression of MYOC in a cell, the method comprising:
(a) contacting the cell with the dsRNA agent of any one of claims 1-23, or a pharmaceutical composition of claim 25; and
(b) maintaining the cell produced in step (a) for a time sufficient to reduce levels of MYOC mRNA, MYOC protein, or both of MYOC mRNA and protein, thereby inhibiting expression of MYOC in the cell.

27. The method of claim 26, wherein the cell is within a subject.

28. The method of claim 27, wherein the subject is a human.

29. The method of claim 28, wherein the subject has been diagnosed with a MYOC-associated disorder, e.g., glaucoma (e.g., primary open angle glaucoma (POAG), angle closure glaucoma, congenital glaucoma, and secondary glaucoma).

30. A method of treating a subject diagnosed with a MYOC-associated disorder comprising administering to the subject a therapeutically effective amount of the dsRNA agent of any one of claims 1-23 or a pharmaceutical composition of claim 25, thereby treating the disorder.

31. The method of claim 30, wherein the MYOC-associated disorder is glaucoma.

32. The method of claim 31, wherein glaucoma is primary open angle glaucoma (POAG).

33. The method of any one of claims 30-32, wherein treating comprises amelioration of at least one sign or symptom of the disorder.

34. The method of any one of claims 30-33, wherein the treating comprises (a) inhibiting or reducing the expression or activity of MYOC; (b) reducing the level of misfolded MYOC protein; (c) reducing trabecular meshwork cell death; (d) decreasing intraocular pressure; or (e) increasing visual acuity.

35. The method of any one of claims 27-34, wherein the dsRNA agent is administered to the subject intraocularly, intravenously, or topically.

36. The method of claim 35, wherein the intraocular administration comprises intravitreal administration (e.g., intravitreal injection), transscleral administration (e.g., transscleral injection), subconjunctival administration (e.g., subconjunctival injection), retrobulbar administration (e.g., retrobulbar injection), intracameral administration (e.g., intracameral injection), or subretinal administration (e.g., subretinal injection).

37. The method of any one of claims 27-36, further comprising administering to the subject an additional agent or therapy suitable for treatment or prevention of an MYOC-associated disorder (e.g., laser trabeculoplasty surgery, trabeculectomy surgery, a minimally invasive glaucoma surgery, placement of a drainage tube in the eye, oral medication, or eye drops).
